(19) United States
(12) Patent Application Publication
(10) Pub. No.: US 2021/0363192 A1
(43) Pub. Date: Nov. 25, 2021

(54) ENGINEERED AAV CAPSIDS WITH INCREASED TROPISM AND AAV VECTORS COMPRISING THE ENGINEERED CAPSIDS AND METHODS OF MAKING AND USING SAME

(71) Applicant: SPARK THERAPEUTICS, INC., Philadelphia, PA (US)

(72) Inventors: Xavier ANGUELA, Barcelona (ES); Sean ARMOUR, Holland, PA (US); Nicholas KEISER, Bryn Mawr, PA (US); Suryanarayan SOMANATHAN, Shrewsbury, MA (US); Mustafa N. YAZICIOGLU, Broomall, PA (US)

(73) Assignee: SPARK THERAPEUTICS, INC., Philadelphia, PA (US)

(21) Appl. No.: 17/050,362

(22) PCT Filed: Apr. 26, 2019
(86) PCT No.: PCT/US2019/029487

§ 371 Date: Oct. 23, 2020

Related U.S. Application Data
(60) Provisional application No. 62/663,963, filed on Apr. 27, 2018.

(51) Int. Cl. C07K 14/005; C12N 7/00; C12N 15/86; C12N 15/113

(52) U.S. Cl. CPC C07K 14/005; C12N 7/00; C12N 15/86; C12N 15/113; C12N 2750/14122; A61K 48/00; C07K 2319/09; C12N 2750/14143; C12N 2750/14123; C12N 2310/14; C12N 2320/32; C12N 2750/14171

(57) ABSTRACT

The invention provides modified adeno-associated virus (AAV) capsid proteins. Modified AAV capsid proteins include, for example, capsid proteins modified to have a peptide insertion comprising a nuclear localization signal (NLS) sequence, capsid proteins modified to have an amino acid substitution at an RXXL site or a (L/P)PXY site, where X can be any amino acid, and capsid proteins modified to have one or more particular amino acid positions substituted with a different amino acid.

### RELATED APPLICATIONS

[0001] This application claims priority to U.S. Provisional Patent Application No. 62/663,963, filed Apr. 27, 2018. The entire contents of the foregoing application is incorporated herein by reference, including all text, tables, sequence listing and drawings.

### INTRODUCTION

[0002] The capsid protein of adeno-associated virus (AAV) has five basic regions that may act as potential nuclear localization signals (NLS). These basic regions are named BR1, BR2, BR3, BR4 and BR5 (Grieger J C et al., 2006, J. Virol, 80:5199-5210; Liu P et al., 2017, Virol. J., 14:80, doi 10.1186/s12985-017-0745-1; Popa-Wagner R et al., 2012, J. Virol., 86:9163-9174). These basic regions are essential for virion assembly and/or viral infectivity. Due to its position on the capsid sequence, BR1 is unique to VP1; BR2 and BR3 are present on both VP1 and VP2; and BR4 and BR5 are present on VP1, VP2 and VP3. It has been reported that only a small fraction of recombinant adeno-associated virus (rAAV) particles (˜17%) can interact with the nuclear pore complex, the gateways into the nucleus, and are allowed to enter the nucleus (Kelich J M et al., 2015, Mol Ther Methods Clin Dev., 2:15047, doi.org/10.1038/mtm.2015.47).

### SUMMARY

[0003] To overcome the restrictive barrier for adeno-associated virus (AAV) transduction, a capsid modification strategy was used to increase AAV vector transduction of cells. Two approaches were used: 1) substituting certain amino acids into different regions of the AAV capsid proteins; and 2) inserting different types of peptides into various locations of the AAV capsid proteins. It was discovered that among different AAV capsid serotypes, certain point mutations of the AAV capsids and insertions of certain peptides into different regions of the AAV capsids can increase AAV vector transduction of cells.

[0004] In one embodiment, an AAV capsid protein is modified to have a peptide insertion, said peptide insertion comprising a nuclear targeting or localization signal (NLS). In particular aspects, a peptide insertion and/or nuclear localization sequence has a length from about 5 to about 60 amino acids.

[0005] In another embodiment, the nuclear localization sequence does not comprise an AAV nuclear localization sequence.

[0006] In another embodiment, the nuclear localization sequence comprises an additional AAV nuclear localization sequence from the same or different AAV serotype.

[0007] In another embodiment, an AAV capsid protein is modified to have an amino acid substitution at an RXXL site or a (L/P)PXY site, where X can be any amino acid.

[0008] In another embodiment, one or more lysine (K) residues substituted with arginine (R) residues. In particular aspects, a K→R substitution is at an RXXL site or a (L/P)PXY site, where X can be any amino acid. In further particular aspects, a K→R substitution is not at an RXXL site or a (L/P)PXY site, where X can be any amino acid.

[0009] In a further embodiment, an AAV capsid protein comprises an amino acid sequence having an alanine at position 517 of SEQ ID NO:1, an alanine at position 519 of SEQ ID NO:59 or 122 or an alanine at the corresponding position in the capsid protein of another AAV serotype.

[0010] In a further embodiment, an AAV capsid protein comprises an amino acid sequence at least 90% identical to SEQ ID NO:1, 59 or 122 and has an alanine at position 517 of SEQ ID NO:1, an alanine at position 519 of SEQ ID NO:59 or 122 or an alanine at the corresponding position in the capsid protein of another AAV serotype.

[0011] In a further embodiment, and AAV capsid protein comprises an amino acid sequence at least 90% identical to SEQ ID NO:1 and has an arginine at any of amino acid positions 137, 528, 533 and 545 of SEQ ID NO:1, or comprises an amino acid sequence at least 90% identical to a capsid protein of another AAV serotype and has an arginine at any of the corresponding amino acid positions in the capsid protein of the other AAV serotype.

[0012] In a further embodiment, and AAV capsid protein comprises an amino acid sequence at least 90% identical to SEQ ID NO:59 and has an arginine at any of amino acid positions 137, 333 and 530 of SEQ ID NO:59, or comprises an amino acid sequence at least 90% identical to a capsid protein of another AAV serotype and has an arginine at any of the corresponding amino acid positions in the capsid protein of the other AAV serotype.

[0013] In particular aspects, the peptide insertion is located at a position between basic region 1 (BR1) and basic region 2 (BR2) of the AAV capsid protein.

[0014] In particular aspects, the peptide insertion is located at a position between basic region 2 (BR2) and basic region 3 (BR3) of said AAV capsid protein.

[0015] In particular aspects, the peptide insertion is not located within basic region 1 (BR1), and/or basic region 2 (BR2), and/or basic region 3 (BR3), and/or basic region 4 (BR4) and/or basic region 5 (BR5) of said AAV capsid protein.

[0016] In particular aspects, the peptide insertion is in AAV VP1 and/or VP2 capsid proteins. In particular aspects, a peptide insertion is not in AAV VP2 capsid protein. In particular aspects, a peptide insertion is not in AAV VP3 capsid protein. In particular aspects, a peptide insertion is not in AAV VP3 capsid protein.

[0017] In particular aspects, the peptide insertion is not in basic region 1 (BR1), basic region 2 (BR2), basic region 3 (BR3), basic region 4 (BR4) or basic region 5 (BR5).

[0018] In particular aspects, the peptide insertion is not in is not in a phospholipase A2 (PLA2) domain.

[0019] In particular aspects, the peptide insertion is located in loop 3 (aka subloop I in loop IV) of VP1 capsid protein.

[0020] In particular aspects, the peptide insertion is located in amino acid positions 30-40, 135-141, 147-166, 380-390, 445-460 or 585-595 of VP1 capsid protein.

[0021] In particular aspects, the peptide insertion is located in amino acid positions 32-33, 34-35, 36-37, 138-139, 139-140, 162-163, 384-385, 450-451, 456-457, 588-589 or 590-591 of VP1 capsid protein.

[0022] In particular aspects, a modified AAV capsid protein has 90% or more sequence identity to a sequence selected from SEQ ID NOs:2-58.

[0023] In particular aspects, a modified AAV capsid protein has 90% or more sequence identity to a sequence selected from SEQ ID NOs:60-83.

[0024] In particular aspects, the peptide insertion is 90% or more identical to a sequence selected from SEQ ID NOs:84-104.

[0025] In particular aspects, the peptide insertion comprises at least two sequences selected from any of SEQ ID NOs:84-92 and 95.

[0026] In particular aspects, at least two of the peptide insertions are sequences selected from any of SEQ ID NOs:84-92 and 95 are the same sequence.

[0027] In particular aspects, at least two of the peptide insertions are sequences selected from any of SEQ ID NOs:84-92 and 95 are different sequences.

[0028] In particular aspects, the peptide insertion comprises a tandem repeat of a sequence selected from any of SEQ ID NOs:84-92 and 95.

[0029] In particular aspects, the peptide insertion comprises a tandem repeat of at least 2 sequences selected from any of SEQ ID NOs:84-92 and 95 wherein any of the 1^{st} of said at least 2 sequences is positioned at the 5 prime end of the 2^{nd} sequence and any of the 2^{nd} of said at least 2 sequences is positioned at the 3 prime end of the 1^{st} sequence.

[0030] In particular aspects, the peptide insertion comprises a tandem repeat of at least 3 sequences selected from any of SEQ ID NOs:93, 94 and 96-104.

[0031] In particular aspects, the peptide insertion comprises a tandem repeat of at least 3 sequences selected from any of SEQ ID NOs:84-92 and 95, wherein the 1^{st} of said at least 3 sequences is positioned at the 5 prime end of the 2^{nd} sequence, the 2^{nd} of said at least 3 sequences is positioned at the 3 prime end of the 1^{st} sequence and the 3^{rd} of said at least 3 sequences is positioned at the 3 prime end of the 2^{nd} sequence.

[0032] In particular aspects of at least two peptide insertion sequences, the at least two sequences are separated by 1, 2, 3, 4 or 5 intervening amino acid residues.

[0033] In various aspects where there are three or more peptide insertion sequences, and there are intervening amino acid residues between the insertion sequences, the intervening amino acid residues may or may not be not the same as each other.

[0034] In particular aspects, the peptide insertion comprises any of SEQ ID NOs:84-104 with one or more amino acid substitutions.

[0035] In particular aspects, the peptide insertion comprises any of SEQ ID NOs:84-104 with 1-10 amino acid substitutions.

[0036] In particular aspects, the peptide insertion comprises any of SEQ ID NOs:84-104 with one or more conservative amino acid substitutions.

[0037] In particular aspects, the parental AAV capsid protein is SEQ ID NO:1, SEQ ID NO:59 or AAV2.

[0038] In particular aspects, the parental AAV capsid protein comprises a VP1, VP2 and/or VP3 capsid sequence having 90% or more identity to Spk100 (SEQ ID NO:59), Spk200 (SEQ ID NO:1), AAV2 (SEQ ID NO:122), AAV1, AAV3, AAV4, AAV5, AAV6, AAV7, AAV8, AAV9, AAV10, AAV11, AAV12, Rh10, or Rh74 VP1, VP2 and/or VP3 sequences.

[0039] The invention also provides recombinant adeno-associated virus (rAAV) particles comprising: a modified AAV capsid protein as set forth herein; and a vector genome comprising a heterologous nucleic acid sequence.

[0040] The invention further provides recombinant adeno-associated virus (rAAV) particles comprising a modified AAV capsid protein as set forth herein, wherein some or all of the rAAV particles are devoid of a heterologous nucleic acid sequence. In particular aspects, such AAV particles have not packaged a full-length heterologous nucleic acid sequence.

[0041] In particular embodiments, the peptide insertion increases or enhances entry or transduction of the invention rAAV particle into the nucleus of a cell, as compared to entry or transduction into the nucleus of a cell of an rAAV particle comprising the parental AAV capsid protein.

[0042] In particular embodiments, the peptide insertion increases or enhances escape of the rAAV particle from cell endosomes as compared to escape of an rAAV particle comprising the parental AAV capsid protein from cell endosomes.

[0043] In particular embodiments, the peptide insertion reduces or decreases degradation of said rAAV particle in cells as compared to degradation in cells of an rAAV particle comprising said parental AAV capsid protein.

[0044] The invention also provides pharmaceutical compositions comprising rAAV particles that comprise the modified AAV capsid proteins as set forth herein and a heterologous nucleic acid sequence.

[0045] The invention further provides pharmaceutical compositions that include AAV empty capsids that comprise the modified AAV proteins, wherein the rAAV empty capsid proteins are devoid of a heterologous nucleic acid sequence.

[0046] The invention moreover provides pharmaceutical compositions that comprise mixtures of rAAV particles that comprise the modified AAV capsid proteins as set forth herein and a heterologous nucleic acid sequence and rAAV empty capsids that comprise the modified/variant AAV capsid proteins, wherein the rAAV empty capsids are devoid of a heterologous nucleic acid sequence.

[0047] The invention additionally provides methods for delivering or transferring a heterologous nucleic acid sequence into a mammal or a cell of a mammal, comprising administering the rAAV particles of the invention, including pharmaceutical compositions comprising the rAAV particles of the invention.

[0048] In one embodiment, a method includes treating a mammal deficient in protein expression or function, by administering an effective amount of an invention rAAV particle or pharmaceutical composition thereof to the mammal.

[0049] In one aspect, the heterologous nucleic acid sequence encodes a protein having a function of the deficient protein, and wherein said protein having said function of said deficient protein is expressed in said mammal, thereby treating said mammal deficient in protein expression or function.

[0050] In a particular aspect, a heterologous nucleic acid sequence encodes a blood coagulation Factor. In more particular aspects, a heterologous nucleic acid sequence encodes Factor VII, VIII, IX, X, XI, V, XII, II, von Willebrand factor, vitamin K epoxide reductase C1, or gamma-carboxylase.

[0051] In further particular aspects, the Factor VIII has a B domain deletion (BDD). In still further particular aspects, the heterologous nucleic acid encoding Factor VIII with the B domain deletion has 20 or fewer, 15 or fewer, or 10 or fewer cytosine-guanine dinucleotides (CpGs), for example, no more than 5 cytosine-guanine dinucleotides (CpGs), such as only 4, 3, 2, 1 or 0 cytosine-guanine dinucleotides (CpGs).

[0052] In additional particular aspects, the Factor VIII comprises SEQ ID NO:123 having a deletion of one or more amino acids of the sequence SFSQNPPVLKRHQR (SEQ ID NO:124), or a deletion of the entire sequence SFSQNPPVLKRHQR.

[0053] In particular aspects, the rAAV particle comprises a heterologous nucleic acid sequence that encodes acid alpha-glucosidase (GAA); ATP7B (copper transporting ATPase2); alpha galactosidase; ASS1 (arginosuccinate synthase); beta-glucocerebrosidase; beta-hexosaminidase A; SERPING1 (C1 protease inhibitor); glucose-6-phosphatase; erythropoietin (EPO; interferon-alpha; interferon-beta; interferon-gamma; an interleukin (IL); any one of Interleukins 1-36 (IL-1 through IL-36); interleukin (IL) receptor; a chemokine; chemokine (C—X—C motif) ligand 5 (CXCL5); granulocyte-colony stimulating factor (G-CSF); granulocyte-macrophage colony stimulating factor (GM-CSF); macrophage colony stimulating factor (M-CSF); keratinocyte growth factor (KGF); monocyte chemoattractant protein-1 (MCP-1); tumor necrosis factor (TNF); a tumor necrosis factor (TNF) receptor; alpha-1 antitrypsin; alpha-L-iduronidase; ornithine transcarbamoylase; phenylalanine hydroxylase (PAH); phenylalanine ammonia-lyase (PAL); lipoprotein lipase; an apolipoprotein; low-density lipoprotein receptor (LDL-R); albumin; lecithin cholesterol acyltransferase (LCAT); carbamoyl synthetase I; argininosuccinate synthetase; argininosuccinate lyase; arginase; fumarylacetoacetate hydrolase; porphobilinogen deaminase; cystathionine beta-synthase; branched chain ketoacid decarboxylase; isovaleryl-CoA dehydrogenase; propionyl CoA carboxylase; methylmalonyl-CoA mutase; glutaryl CoA dehydrogenase; insulin; pyruvate carboxylase; hepatic phosphorylase; phosphorylase kinase; glycine decarboxylase; H-protein, T-protein, cystic fibrosis transmembrane regulator (CFTR); ATP-binding cassette, sub-family A (ABC1), member 4 (ABCA4); or dystrophin.

[0054] In particular aspects, the rAAV particle comprises a heterologous nucleic acid sequence that encodes an inhibitory RNA. In more particular aspects, the inhibitory RNA comprises a short hairpin (sh)RNA, a microRNA (miRNA), a small or short interfering (si)RNA, a trans-splicing RNA, or an antisense RNA.

[0055] Subjects administered invention rAAV vectors in accordance with the invention include mammals, such as humans. Particular subjects are those in need of administration.

[0056] In various embodiments, the human has a blood clotting disorder, such as hemophilia A or hemophilia B, Pompe disease, Wilson's disease, Fabry disease, citrullinemia type 1, Gaucher disease type 1, Tay Sachs disease, hereditary angioedema (HAE), glycogen storage disease type I (GSDI), anemia, an interferon-alpha, interferon-beta, or interferon-gamma related immune disorder, a viral infection, cancer, an inflammatory disease, an immune deficiency, an immune disorder, Crohn's disease, epithelial tissue damage, insulin resistance, emphysema, chronic obstructive pulmonary disease (COPD), mucopolysaccharidosis I (MPS I), ornithine transcarbamylase (OTC) deficiency, phenylketonuria (PKU), lipoprotein lipase deficiency, apolipoprotein (Apo) A-I deficiency, familial hypercholesterolemia (FH), Stargardt disease or hypoalbuminemia.

[0057] The invention also provides methods of producing invention rAAV particles. In one embodiment, a method includes introducing a nucleic acid encoding the modified AAV capsid protein as set forth herein into a packaging helper cell, in which the helper cell comprises an AAV vector genome; and culturing the helper cell under conditions to produce the rAAV particle. In another embodiment a method includes introducing a nucleic acid encoding the modified AAV capsid protein as set forth herein and introducing the AAV vector genome into a packaging helper cell; and culturing the helper cells under conditions to produce the rAAV particle.

[0058] Helper cells comprise mammalian cells. Helper cells provide helper functions that package the AAV vector genome into an AAV particle. Examples of helper functions include Rep and/or Cap protein sequence(s), such as Rep78 or/and Rep68 proteins. Such cells may be stably or transiently transfected with Rep78 and Rep68 proteins polynucleotide encoding sequence(s). Such cells include, for example, HEK-293 cells.

### DESCRIPTION OF DRAWINGS

[0059] FIG. 1A shows luciferase activity in lysates of Huh7 cells transduced with Spark200, Spark200-140cmycNLS, Spark200-140class3NLS, Spark200-140hnRNP_D_NLS and Spark200-L517A vectors, carrying a Renilla luciferase transgene.

[0060] FIG. 1B shows luciferase activity in lysates of HEK293 cells transduced with Spark200, Spark200-140cmycNLS, Spark200-140class3NLS, Spark200-140hnRNP_D_NLS and Spark200-L517A vectors, carrying a Renilla luciferase transgene.

[0061] FIG. 1C shows relative amounts of FIX in media of cultures of Huh7 cells transduced (20,000 MOI) with Spark200 (100%), Spark200-140cmycNLS, Spark200-140class3NLS, Spark200-140hnRNP_D_NLS and Spark200-L517A rAAV vectors, carrying a FIX transgene.

[0062] FIG. 2 shows luciferase activity in lysates of Huh7 cells transduced (2,000 MOI) with Spark200 rAAV or various Spark200 variant rAAV having cell penetrating peptide inserts, carrying a Renilla luciferase transgene. All the cell penetrating peptides decreased the transduction as compared to Spark200. Moreover, some of the peptide inserts decreased the vector production yield, making them difficult to produce.

[0063] FIG. 3 shows relative amounts of luciferase activity in Huh7 cells following transduction by Spark100 variant rAAVs with 1×NLS insertions, carrying a Renilla luciferase transgene, compared to wild type Spark100 rAAV (100%).

[0064] FIG. 4 shows relative amounts of luciferase activity in Huh7 cells following transduction by Spark100 variant rAAVs with 2×NLS insertions, carrying a Renilla luciferase transgene, compared to wild type Spark100 rAAV (100%).

[0065] FIG. 5 shows relative amounts of luciferase activity in Huh7 cells following transduction by Spark100 variant rAAVs with 3×NLS inserts, carrying a Renilla luciferase transgene, compared to wild type Spark100 rAAV (100%).

[0066] FIG. 6 shows the location of peptide insertions for Spark100 and Spark200 in the VP1, VP2 and VP3 capsid proteins.

[0067] FIG. 7 shows relative amounts of luciferase activity in Huh7 cells following transduction by Spark100 variant rAAVs with insertions into the region between BR2 and BR3 compared to wild type Spark100 rAAV (100%).

[0068] FIG. 8 shows a graph of FIX levels (ng/mL) in the plasma of C57BL/6 mice, measured by ELISA, at various timepoints following administration of (1) wild type AAV2 rAAV particles carrying a FIX transgene (circles) or (2) AAV2 rAAV particles with cmycNLS (SEQ ID NO:86) inserted into VP1 (between amino acid residues 34 and 35), also carrying a FIX transgene (squares).

[0069] FIG. 9 shows an alignment of AAV2 (SEQ ID NO:122), Spk200 (SEQ ID NO:1) and Spk100 (SEQ ID NO: 59) VP1 capsid proteins, representative insertion sites, the phospholipase A2 (PLA2) domain and the 5 basic regions (BRs).

[0070] FIG. 10 shows GAA activity in the plasma of C57BL/6 mice, three weeks after administration of rAAV particles with wild type Spark100 or Spark100 variant capsids having SV40 and class3 NLS insertions, and carrying a GAA transgene.

[0071] FIG. 11 shows GAA activity in the plasma of C57BL/6 mice, one week after administration of rAAV particles with wild type Spark100 capsid or with variant capsids having NLS peptide insertions: Spark100-140-cmycNLS (labeled SparkX04), Spark100-140-hnRNP_D_NLS (labeled SparkX05), Spark100-140-class3 NLS (labeled SparkX06) and Spark100-140-2×cmycNLS (labeled SparkX08).

[0072] FIGS. 12A and 12B show luciferase activity in lysates of Huh7 cells transduced with Spark100 rAAV or various Spark100 variant rAAV having NLS peptide insertions in only VP1, carrying a Renilla luciferase transgene. The variants were as follows: Spark100-33-cmycNLS (labeled asSpark100_X42), Spark100-35-cmycNLS (labeled as Spark100_X43), Spark100-33-2×cmycNLS (labeled as Spark100_X44), Spark100-35-2×cmycNLS (labeled as Spark100_X45), Spark100-35-3×cmycNLS (labeled as Spark100_X46), Spark100-35-1×Class3NLS (labeled as Spark100_X47), Spark100-35-2×Class3NLS (labeled as Spark100_X48, Spark100-35-3×Class3NLS (labeled as Spark100_X49), Spark100-35-hnRNP_NLS (labeled as Spark100_X50), and Spark100-35-1×-SV40 NLS (labeled as Spark100_X51).

[0073] FIG. 13 shows luciferase activity in lysates of Huh7 cells transduced with Spark100 rAAV orSpark100 having K4R point mutations at positions 333 (K333R; labeled Spark100_X52) and 530 (K530R; labeled Spark100_X53).

[0074] FIG. 14 shows luciferase activity in lysates of Huh7 cells transduced with Spark100 rAAV or the following Spark100 variants having VP3 region NLS insertions (insertion is in all of VP1, VP2 and VP3 proteins): Spark100_385cmycNLS (labeled as Spark100_X54), Spark100_451cmycNLS (labeled as Spark100_X55), Spark100_457cmycNLS (labeled as Spark100_X56), Spark100_589cmycNLS (labeled as Spark100_X57) and Spark100_591cmycNLS (labeled as Spark100-X58).

[0075] FIG. 15 shows an alignment of the amino acid sequences for AAV1-AAV11, AAV3B, Spk200 (SEQ ID NO:1) and Spk100 (SEQ ID NO:59) VP1 capsid proteins.

[0076] FIGS. 16A-16F show representative insertion sites in AAV1-AAV11, AAV3B, Spk200 and Spk100 VP1 capsid proteins.

### DETAILED DESCRIPTION

[0077] The invention provides modified AAV capsid proteins, nucleic acids encoding modified AAV capsid proteins, AAV vector genomes comprising nucleic acids encoding modified AAV proteins, recombinant AAV vectors and particles comprising the modified AAV proteins of the invention.

[0078] As used herein, the terms “modify” or “variant” and grammatical variations thereof, mean that a nucleic acid or protein deviates from a reference or parental sequence. A modified or variant protein refers to a protein sequence which has been altered compared to reference (e.g., wild-type) or parental sequence. Modified and variant sequences may therefore have substantially the same, greater or less activity or function than a reference or parental sequence, but at least retain partial activity or function of the reference or parental sequence. The sequence may be genetically modified to encode a modified or variant protein.

[0079] A “modified AAV capsid protein” or “variant AAV capsid protein” means that the capsid protein has an amino acid alteration compared the parental unmodified AAV capsid protein. Such an AAV capsid protein can be referred to as a modified or variant AAV capsid protein. A particular example of a modification of a capsid protein is an amino acid substitution. Another particular example of a modification of a capsid protein is a peptide insertion. The terms “modification” or “variant” herein need not appear in each instance of a reference made to an AAV capsid protein.

[0080] In particular embodiments, a modified or variant capsid protein retains at least part of a function or activity of unmodified reference or parental capsid protein. The function or activity of an AAV capsid protein includes the ability to package the AAV vector genome into productive viral particles that are able to transduce cells and in turn able introduce the heterologous sequence in the vector genome in the transduced cells for expression. Such an AAV capsid protein that has been modified as set forth herein can be compared to the unmodified reference or parental AAV capsid protein.

[0081] Accordingly, the AAV capsid “proteins,” “polypeptides” and “peptides” include modified forms or variants so long as the modified form or variant retains some degree or aspect of functionality of the reference or parental AAV capsid. For example, a modified AAV capsid protein may retain the ability to package the AAV vector genome into productive AAV particles which subsequently can be used to transduce cells thereby introducing a heterologous nucleic acid sequence into the cells for subsequent suppression.

[0082] In addition, a modified/variant AAV capsid protein may not retain the ability to package an AAV vector genome but still be able to form AAV particles or in the case of a modified AAV capsid protein not containing a vector genome but again is still able to form AAV particles, such modified AAV capsid proteins are considered functional since they form AAV particles which may be used as decoys to bind to neutralizing AAV antibodies that may be present in subjects that have pre-existing AAV neutralizing antibodies or are anticipated to develop AAV neutralizing antibodies against AAV particles, for example, as a result of AAV-based gene therapy. Such AAV particles that are unable to package an AAV vector genome or do not have an AAV vector genome comprising a heterologous nucleic acid sequence are still useful in the context of gene therapy since such AAV particles can be used to block AAV neutralizing antibodies from binding to AAV particles that have packaged an AAV vector genome that comprises a heterologous nucleic sequence.

[0083] As set forth herein, modified/variant AAV capsid proteins can exhibit different characteristics or have improvements compared to a reference or parental AAV capsid protein. When comparing the different characteristics or improvements, it is appropriate to compare it to the reference or parental AAV capsid protein. In the case that the parental AAV capsid protein has already been modified, a further modification of the parental AAV capsid protein as set forth herein, for example an amino acid substitution or peptide insertion as set forth herein, the comparison is to the parental modified AAV capsid protein prior to the amino acid substitution or peptide insertion.

[0084] A “nuclear localization signal” (NLS) peptide is typically a short peptide sequence that can mediate or facilitate nuclear import (passage into the cellular nucleus) of molecules such as proteins by binding to NLS receptors, known as importins or karyopherins.

[0085] Although not wishing to be bound by any theory, it is believed that the NLS peptide insertions operate by increasing or enhancing nuclear transduction of the recombinant AAV vector. Increased or enhanced “nuclear transduction” refers to increased tropism for the nucleus, which includes, for example, increased localization into the cell nucleus, increased endocytosis by the cell nucleus, increased penetration of the cell nucleus, increased entry into the cell nucleus, increased importation into the nucleus, increased targeting of the cell nucleus, increased binding to the cell nucleus and grammatical variations thereof.

[0086] Nuclear transduction could occur through many mechanisms. For example, the NLS peptide insertion could bind to a protein within the cell which functions as a carrier to transport a recombinant AAV into the nucleus. Alternatively, a recombinant AAV could bind to a target on the nuclear membrane which is subsequently internalized within the cell nucleus.

[0087] A peptide insertion may provide the recombinant AAV with increased binding affinity for the surface of the cell membrane, due for example to increased affinity for a cell surface protein. This increased binding affinity could lead to increased endocytosis into the cytoplasm and subsequent transduction into the cell's nucleus. A particular example of such a peptide insertion is a cell penetrating peptide which can bind to the cell membrane and be internalized within the cell. A “cell penetrating peptide” refers to a peptide sequence capable of crossing the cell membrane and that can mediate or facilitate entry (passage) through the cell membrane of other molecules, including, for example, proteins, nucleic acids, therapeutics and nanoparticles. After internalization, the recombinant AAV subsequently enters into the nucleus, for example, by fusion of cell membrane components to the nuclear membrane.

[0088] Peptide insertions as set forth herein may provide additional characteristics to the recombinant AAV. It is expressly intended that any other characteristics provided by the NLS peptide insertions or cell penetrating peptide insertions are not excluded by any potential mechanism for increased transduction into the nucleus of a cell or increased transduction into the cell, respectively, as set forth herein.

[0089] As set forth herein AAV capsid modifications/variants include amino acid substitutions and peptide insertions. Non-limiting examples of amino acid substitutions include substituting 1-3, 3-5, 5-10, 10-15, 15-20, 20-25, 25-30, 30-40, 40-50, 50-100, 100-150, 150-200, 200-250 or more amino acid residues. Non-limiting examples of peptide insertions include 2 or more contiguous/adjacent amino acid residues inserted into AAV capsids, for example, 2-3, 3-5, 5-10, 10-15, 15-20, 20-25, 25-30, 30-40, 40-50, 50-100 or more amino acid residues. In the situation of a substitution as set forth herein, where there are 2 or more substitutions made, the substitutions are not adjacent to each other. In other words, if there are 2 or more amino acid substitutions and the 2 or more amino acid residues are contiguous/adjacent to each other than they are considered a peptide insertion.

[0090] In certain embodiments, a peptide insertion has a length of about 5 amino acids to about 60 amino acids. In further embodiments, a peptide insertion has a length of about 8 amino acids to about 50 amino acids. In additional embodiments, a peptide insertion has a length of about 10 amino acids to about 40 amino acids. In still further embodiments, a peptide insertion has a length of about 10 amino acids to about 30 amino acids. In still additional embodiments, a peptide insertion has a length of about 10 amino acids to about 25 amino acids.

[0091] The term “vector” refers to small carrier nucleic acid molecule, a plasmid, virus (e.g., AAV vector), or other vehicle that can be manipulated by insertion or incorporation of a nucleic acid. Such vectors can be used for genetic manipulation (i.e., “cloning vectors”), to introduce/transfer polynucleotides into cells, and to transcribe or translate the inserted polynucleotide in cells. An “expression vector” is a specialized vector that contains a gene or nucleic acid sequence with the necessary regulatory regions needed for expression in a host cell. A vector nucleic acid sequence generally contains at least an origin of replication for propagation in a cell and optionally additional elements, such as a heterologous polynucleotide sequence, expression control element (e.g., a promoter, enhancer), intron, an inverted terminal repeat (ITR), selectable marker (e.g., antibiotic resistance), polyadenylation signal.

[0092] A viral vector is derived from or based upon one or more nucleic acid elements that comprise a viral genome. A particular viral vector is an adeno-associated virus (AAV) vector.

[0093] The term “recombinant,” as a modifier of vector, such as recombinant AAV vector, as well as a modifier of sequences such as recombinant polynucleotides and polypeptides, means that the compositions have been manipulated (i.e., engineered) in a fashion that generally does not occur in nature. A particular example of a recombinant AAV vector would be where a click acid sequence that is not normally present in the wild-type AAV genome is inserted within the AAV genome. Although the term “recombinant” is not always used herein in reference to AAV vectors, as well as sequences such as polynucleotides, recombinant forms including polynucleotides, are expressly included in spite of any such omission.

[0094] A “recombinant AAV vector” or “rAAV” is derived from the wild type (wt or wild-type) genome of AAV by using molecular methods to remove the wild type genome from the AAV genome, and replacing with a non-native nucleic acid sequence, referred to as a heterologous nucleic acid. Typically, for AAV one or both inverted terminal repeat (ITR) sequences of AAV genome are retained in the AAV vector. rAAV is distinguished from an AAV genome, since all or a part of the AAV genome has been replaced with a non-native sequence with respect to the AAV genomic nucleic acid. Incorporation of a non-native sequence therefore defines the AAV vector as a “recombinant” vector, which can be referred to as a “rAAV vector.”

[0095] A rAAV sequence can be packaged—referred to herein as a “particle”—for subsequent infection (transduction) of a cell, ex vivo, in vitro or in vivo. Where a recombinant AAV vector sequence is encapsidated or packaged into an AAV particle, the particle can also be referred to as a “rAAV vector” or “rAAV particle.” Such rAAV particles include proteins that encapsidate or package the vector genome. In the case of AAV, they are referred to as capsid proteins.

[0096] A vector “genome” refers to the portion of the recombinant plasmid sequence that is ultimately packaged or encapsidated to form a viral (e.g., AAV) particle. In cases where recombinant plasmids are used to construct or manufacture recombinant vectors, the vector genome does not include the portion of the “plasmid” that does not correspond to the vector genome sequence of the recombinant plasmid. This non vector genome portion of the recombinant plasmid is referred to as the “plasmid backbone,” which is important for cloning and amplification of the plasmid, a process that is needed for propagation and recombinant virus production, but is not itself packaged or encapsidated into virus (e.g., AAV) particles. Thus, a vector “genome” refers to the nucleic acid that is packaged or encapsidated by virus (e.g., AAV).

[0097] The terms “nucleic acid” and “polynucleotide” are used interchangeably herein to refer to all forms of nucleic acid, oligonucleotides, including deoxyribonucleic acid (DNA) and ribonucleic acid (RNA). Nucleic acids include genomic DNA, cDNA and antisense DNA, and spliced or unspliced mRNA, rRNA tRNA and inhibitory DNA or RNA (RNAi, e.g., small or short hairpin (sh)RNA, microRNA (miRNA), small or short interfering (si)RNA, trans-splicing RNA, or antisense RNA). Nucleic acids include naturally occurring, synthetic, and intentionally modified or altered polynucleotides (e.g., variant nucleic acid). The nucleic acids such as cDNA, genomic DNA, RNA, and fragments thereof which may be single- or double-stranded.

[0098] Polynucleotides can be single, double, or triplex, linear or circular, and can be of any length. In discussing polynucleotides, a sequence or structure of a particular polynucleotide may be described herein according to the convention of providing the sequence in the 5′ to 3′ direction.

[0099] A “transgene” is used herein to conveniently refer to a heterologous nucleic acid that is intended or has been introduced into a cell or organism. Transgenes include any heterologous nucleic acid, such as a gene that encodes a polypeptide or protein or encodes an inhibitory RNA.

[0100] A heterologous nucleic acid can be introduced/transferred by way of vector, such as AAV, “transduction” or “transfection” into a cell. The term “transduce” and grammatical variations thereof refer to introduction of a molecule such as an rAAV vector into a cell or host organism. The heterologous nucleic acid/transgene may or may not be integrated into genomic nucleic acid of the recipient cell. The introduced heterologous nucleic acid may also exist in the recipient cell or host organism extrachromosomally, or only transiently.

[0101] A “transduced cell” is a cell into which the transgene has been introduced. Accordingly, a “transduced” cell (e.g., in a mammal, such as a cell or tissue or organ cell), means a genetic change in a cell following incorporation of an exogenous molecule, for example, a nucleic acid (e.g., a transgene) into the cell. Thus, a “transduced” cell is a cell into which, or a progeny thereof in which an exogenous nucleic acid has been introduced. The cell(s) can be propagated and the introduced protein expressed, or nucleic acid transcribed. For gene therapy uses and methods, a transduced cell can be in a subject.

[0102] An “expression control element” refers to nucleic acid sequence(s) that influence expression of an operably linked nucleic acid. Control elements, including expression control elements as set forth herein such as promoters and enhancers. Vector sequences including AAV vectors can include one or more “expression control elements.” Typically, such elements are included to facilitate proper heterologous polynucleotide transcription and if appropriate translation (e.g., a promoter, enhancer, splicing signal for introns, maintenance of the correct reading frame of the gene to permit in-frame translation of mRNA and, stop codons etc.). Such elements typically act in cis, referred to as a “cis acting” element, but may also act in trans.

[0103] Expression control can be effected at the level of transcription, translation, splicing, message stability, etc. Typically, an expression control element that modulates transcription is juxtaposed near the 5′ end (i.e., “upstream”) of a transcribed nucleic acid. Expression control elements can also be located at the 3′ end (i.e., “downstream”) of the transcribed sequence or within the transcript (e.g., in an intron). Expression control elements can be located adjacent to or at a distance away from the transcribed sequence (e.g., 1-10, 10-25, 25-50, 50-100, 100 to 500, or more nucleotides from the polynucleotide), even at considerable distances. Nevertheless, owing to the length limitations of AAV vectors, expression control elements will typically be within 1 to 1000 nucleotides from the transcribed nucleic acid.

[0104] Functionally, expression of operably linked nucleic acid is at least in part controllable by the element (e.g., promoter) such that the element modulates transcription of the nucleic acid and, as appropriate, translation of the transcript. A specific example of an expression control element is a promoter, which is usually located 5′ of the transcribed nucleic acid sequence. A promoter typically increases an amount expressed from operably linked nucleic acid as compared to an amount expressed when no promoter exists.

[0105] An “enhancer” as used herein can refer to a sequence that is located adjacent to the heterologous nucleic acid. Enhancer elements are typically located upstream of a promoter element but also function and can be located downstream of or within a sequence. Hence, an enhancer element can be located 10-50 base pairs, 50-100 base pairs, 100-200 base pairs, or 200-300 base pairs, or more base pairs upstream or downstream of a heterologous nucleic acid sequence. Enhancer elements typically increase expressed of an operably linked nucleic acid above expression afforded by a promoter element.

[0106] An expression construct may comprise regulatory elements which serve to drive expression in a particular cell or tissue type. Expression control elements (e.g., promoters) include those active in a particular tissue or cell type, referred to herein as a “tissue-specific expression control elements/promoters.” Tissue-specific expression control elements are typically active in specific cell or tissue (e.g., liver). Expression control elements are typically active in particular cells, tissues or organs because they are recognized by transcriptional activator proteins, or other regulators of transcription, that are unique to a specific cell, tissue or organ type. Such regulatory elements are known to those of skill in the art (see, e.g., Sambrook et al. (1989) and Ausubel et al. (1992)).

[0107] The incorporation of tissue specific regulatory elements in the expression constructs provides for at least partial tissue tropism for the expression of a heterologous nucleic acid encoding a protein or inhibitory RNA. Examples of promoters that are active in liver are the transthyretin (TTR) promoter (SEQ ID NO:125); mutant TTR promoter (SEQ ID NO:126); human alpha 1-antitrypsin (hAAT) promoter; albumin promoter, Miyatake, et al., J. Virol., 71:5124-32 (1997); hepatitis B virus core promoter, Sandig, et al., Gene Ther. 3:1002-9 (1996); and the alpha-fetoprotein (AFP) promoter, Arbuthnot, et al., Hum. Gene. Ther., 7:1503-14 (1996), among others. An example of an enhancer active in liver is apolipoprotein E (apoE) HCR-1 and HCR-2 (Allan et al., J. Biol. Chem., 272:29113-19 (1997)).

[0108] Expression control elements also include ubiquitous or promiscuous promoters/enhancers which are capable of driving expression of a polynucleotide in many different cell types. Such elements include, but are not limited to the cytomegalovirus (CMV) immediate early promoter/enhancer sequences, the Rous sarcoma virus (RSV) promoter/enhancer sequences and the other viral promoters/enhancers active in a variety of mammalian cell types, or synthetic elements that are not present in nature (see, e.g., Boshart et al., Cell, 41:521-530 (1985)), the SV40 promoter, the dihydrofolate reductase promoter, the cytoplasmic β-actin promoter and the phosphoglycerol kinase (PGK) promoter.

[0109] Expression control elements also can confer expression in a manner that is regulatable, that is, a signal or stimuli increases or decreases expression of the operably linked heterologous polynucleotide. A regulatable element that increases expression of the operably linked polynucleotide in response to a signal or stimuli is also referred to as an “inducible element” (i.e., is induced by a signal). Particular examples include, but are not limited to, a hormone (e.g., steroid) inducible promoter. Typically, the amount of increase or decrease conferred by such elements is proportional to the amount of signal or stimuli present; the greater the amount of signal or stimuli, the greater the increase or decrease in expression. Particular non-limiting examples include zinc-inducible sheep metallothionine (MT) promoter; the steroid hormone-inducible mouse mammary tumor virus (MMTV) promoter; the T7 polymerase promoter system (WO 98/10088); the tetracycline-repressible system (Gossen, et al., Proc. Natl. Acad. Sci. USA, 89:5547-5551 (1992)); the tetracycline-inducible system (Gossen, et al., Science. 268:1766-1769 (1995); see also Harvey, et al., Curr. Opin. Chem. Biol. 2:512-518 (1998)); the RU486-inducible system (Wang, et al., Nat. Biotech. 15:239-243 (1997) and Wang, et al., Gene Ther. 4:432-441 (1997)]; and the rapamycin-inducible system (Magari, et al., J. Clin. Invest. 100:2865-2872 (1997); Rivera, et al., Nat. Medicine. 2:1028-1032 (1996)). Other regulatable control elements which may be useful in this context are those which are regulated by a specific physiological state, e.g., temperature, acute phase, development.

[0110] Expression control elements also include the native elements(s) for the heterologous polynucleotide. A native control element (e.g., promoter) may be used when it is desired that expression of the heterologous polynucleotide should mimic the native expression. The native element may be used when expression of the heterologous polynucleotide is to be regulated temporally or developmentally, or in a tissue-specific manner, or in response to specific transcriptional stimuli. Other native expression control elements, such as introns, polyadenylation sites or Kozak consensus sequences may also be used.

[0111] The term “operably linked” means that the regulatory sequences necessary for expression of a nucleic acid sequence are placed in the appropriate positions relative to the sequence so as to effect expression of the nucleic acid sequence. This same definition is sometimes applied to the arrangement of nucleic acid sequences and transcription control elements (e.g. promoters, enhancers, and termination elements) in an expression vector, e.g., rAAV vector.

[0112] In the example of an expression control element in operable linkage with a nucleic acid, the relationship is such that the control element modulates expression of the nucleic acid. More specifically, for example, two DNA sequences operably linked means that the two DNAs are arranged (cis or trans) in such a relationship that at least one of the DNA sequences is able to exert a physiological effect upon the other sequence.

[0113] Accordingly, additional elements for vectors include, without limitation, an expression control (e.g., promoter/enhancer) element, a transcription termination signal or stop codon, 5′ or 3′ untranslated regions (e.g., polyadenylation (polyA) sequences) which flank a sequence, such as one or more copies of an AAV ITR sequence, or an intron.

[0114] Further elements include, for example, filler or stuffer polynucleotide sequences, for example to improve packaging and reduce the presence of contaminating nucleic acid. AAV vectors typically accept inserts of DNA having a size range which is generally about 4 kb to about 5.2 kb, or slightly more. Thus, for shorter sequences, inclusion of a stuffer or filler in order to adjust the length to near or at the normal size of the virus genomic sequence acceptable for AAV vector packaging into virus particle. In various embodiments, a filler/stuffer nucleic acid sequence is an untranslated (non-protein encoding) segment of nucleic acid. For a nucleic acid sequence less than 4.7 kb, the filler or stuffer polynucleotide sequence has a length that when combined (e.g., inserted into a vector) with the sequence has a total length between about 3.0-5.5 kb, or between about 4.0-5.0 kb, or between about 4.3-4.8 kb.

[0115] Where a wild type heterologous nucleic acid or transgene is too large to be packaged within an AAV vector particle, the heterologous nucleic acid may be provided in modified, fragmented or truncated form for packaging in and delivery by an AAV vector, such that a functional protein or nucleic acid product, such as a therapeutic protein or nucleic acid product, is ultimately provided.

[0116] In some embodiments, the heterologous nucleic acid that encodes a protein (e.g., therapeutic protein) is provided in modified or truncated forms or the heterologous nucleic acid is provided in multiple constructs, delivered by separate and multiple AAV vectors.

[0117] In certain aspects, the heterologous nucleic acid is provided as a truncated variant that maintains functionality of the encoded protein (e.g., therapeutic protein), including removal of portions unnecessary for function, such that the encoding heterologous polynucleotide is reduced in size for packaging in an AAV vector.

[0118] In certain aspects the heterologous nucleic acid is provided in split AAV vectors, each providing nucleic acid encoding different portions of a protein (e.g., therapeutic protein), thus delivering multiple portions of a protein (e.g., therapeutic protein) which assemble and function in the cell.

[0119] In other aspects, the heterologous nucleic acid is provided by dual AAV vectors using overlapping, trans-splicing or hybrid trans-splicing dual vector technology. In certain embodiments, two overlapping AAV vectors are used which combine in the cell to generate a full expression cassette, from which a full-length protein (e.g., therapeutic protein) is expressed.

[0120] A “hemostasis related disorder” refers to bleeding disorders such as hemophilia A, hemophilia A with inhibitory antibodies, hemophilia B, hemophilia B with inhibitory antibodies, a deficiency in any coagulation Factor: VII, VIII, IX, X, XI, V, XII, II, von Willebrand factor, combined FV/FVIII deficiency, thalassemia, vitamin K epoxide reductase C1 deficiency, or gamma-carboxylase deficiency; bleeding associated with trauma, injury, thrombosis, thrombocytopenia, stroke, coagulopathy, or disseminated intravascular coagulation (DIC); over-anticoagulation associated with heparin, low molecular weight heparin, pentasaccharide, warfarin, or small molecule antithrombotics (i.e., FXa inhibitors); and platelet disorders such as, Bernard Soulier syndrome, Glanzmann thrombasthenia, and storage pool deficiency.

[0121] The term “isolated,” when used as a modifier of a composition, means that the compositions are made by the hand of man or are separated, completely or at least in part, from their naturally occurring in vivo environment. Generally, isolated compositions are substantially free of one or more materials with which they normally associate with in nature, for example, one or more protein, nucleic acid, lipid, carbohydrate, cell membrane.

[0122] The term “isolated” does not exclude combinations produced by the hand of man, for example, a rAAV sequence, or rAAV particle that packages or encapsidates an AAV vector genome and a pharmaceutical formulation. The term “isolated” also does not exclude alternative physical forms of the composition, such as hybrids/chimeras, multimers/oligomers, modifications (e.g., phosphorylation, glycosylation, lipidation) or derivatized forms, or forms expressed in host cells produced by the hand of man.

[0123] The term “substantially pure” refers to a preparation comprising at least 50-60% by weight the compound of interest (e.g., nucleic acid, oligonucleotide, protein, etc.). The preparation can comprise at least 75% by weight, or at least 85% by weight, or about 90-99% by weight, of the compound of interest. Purity is measured by methods appropriate for the compound of interest (e.g., chromatographic methods, agarose or polyacrylamide gel electrophoresis, HPLC analysis, and the like).

[0124] The phrase “consisting essentially of” when referring to a particular nucleotide sequence or amino acid sequence means a sequence having the properties of a given SEQ ID NO. For example, when used in reference to an amino acid sequence, the phrase includes the sequence per se and molecular modifications that would not affect the basic and novel characteristics of the sequence.

[0125] The term “identity,” “homology” and grammatical variations thereof, mean that two or more referenced entities are the same, when they are “aligned” sequences. Thus, by way of example, when two protein sequences are identical, they have the same amino acid sequence, at least within the referenced region or portion. Where two nucleic acid sequences are identical, they have the same nucleic acid sequence, at least within the referenced region or portion. The identity can be over a defined area (region or domain) of the sequence.

[0126] An “area” or “region” of identity refers to a portion of two or more referenced entities that are the same. Thus, where two protein or nucleic acid sequences are identical over one or more sequence areas or regions they share identity within that region. An “aligned” sequence refers to multiple protein (amino acid) or nucleic acid sequences, often containing corrections for missing or additional bases or amino acids (gaps) as compared to a reference sequence.

[0127] The identity can extend over the entire length or a portion of the sequence. In certain embodiments, the length of the sequence sharing the percent identity is 2, 3, 4, 5 or more contiguous amino acids or nucleic acids, e.g., 6, 7, 8, 9, 10, 11, 12, 13, 14, 15, 16, 17, 18, 19, 20, etc. contiguous nucleic acids or amino acids. In additional embodiments, the length of the sequence sharing identity is 21 or more contiguous amino acids or nucleic acids, e.g., 21, 22, 23, 24, 25, 26, 27, 28, 29, 30, 31, 32, 33, 34, 35, 36, 37, 38, 39, 40, etc. contiguous amino acids or nucleic acids. In further embodiments, the length of the sequence sharing identity is 41 or more contiguous amino acids or nucleic acids, e.g., 42, 43, 44, 45, 45, 47, 48, 49, 50, etc., contiguous amino acids or nucleic acids. In yet further embodiments, the length of the sequence sharing identity is 50 or more contiguous amino acids or nucleic acids, e.g., 50-55, 55-60, 60-65, 65-70, 70-75, 75-80, 80-85, 85-90, 90-95, 95-100, 100-150, 150-200, 200-250, 250-300, 300-500, 500-1,000, etc. contiguous amino acids or nucleic acids.

[0128] As set forth herein, modified/variant AAV capsids will be distinct from wild-type but may exhibit sequence identity with the parental or reference AAV capsid. Modified/variant AAV capsids will typically be at least about 70%-80% identical, more typically about 80%-90% identical, even more typically about 90-99.9% identical, and most typically 95%-99.9% identical to parental or reference AAV capsid protein.

[0129] The extent of identity (homology) or “percent identity” between two sequences can be ascertained using a computer program and/or mathematical algorithm. For purposes of this invention comparisons of nucleic acid sequences are performed using the GCG Wisconsin Package version 9.1, available from the Genetics Computer Group in Madison, Wis. For convenience, the default parameters (gap creation penalty=12, gap extension penalty=4) specified by that program are intended for use herein to compare sequence identity. Alternately, the Blastn 2.0 program provided by the National Center for Biotechnology Information (found on the world wide web at ncbi.nlm.nih.gov/blast/; Altschul et al., 1990, J Mol Biol 215:403-410) using a gapped alignment with default parameters, may be used to determine the level of identity and similarity between nucleic acid sequences and amino acid sequences. For polypeptide sequence comparisons, a BLASTP algorithm is typically used in combination with a scoring matrix, such as PAM100, PAM 250, BLOSUM 62 or BLOSUM 50. FASTA (e.g., FASTA2 and FASTA3) and SSEARCH sequence comparison programs are also used to quantitate extent of identity (Pearson et al., Proc. Natl. Acad. Sci. USA 85:2444 (1988); Pearson, Methods Mol Biol. 132:185 (2000); and Smith et al., J. Mol. Biol. 147:195 (1981)). Programs for quantitating protein structural similarity using Delaunay-based topological mapping have also been developed (Bostick et al., Biochem Biophys Res Commun. 304:320 (2003)).

[0130] Nucleic acid molecules, expression vectors (e.g., AAV vector genomes), plasmids, including nucleic acid encoding modified/variant AAV capsids of the invention and heterologous nucleic acids may be prepared by using recombinant DNA technology methods. The availability of nucleotide sequence information enables preparation of isolated nucleic acid molecules of the invention by a variety of means. For example, nucleic acid sequences encoding modified/variant AAV capsids can be made using various standard cloning, recombinant DNA technology, via cell expression or in vitro translation and chemical synthesis techniques. Purity of polynucleotides can be determined through sequencing, gel electrophoresis and the like. For example, nucleic acids can be isolated using hybridization or computer-based database screening techniques. Such techniques include, but are not limited to: (1) hybridization of genomic DNA or cDNA libraries with probes to detect homologous nucleotide sequences; (2) antibody screening to detect polypeptides having shared structural features, for example, using an expression library; (3) polymerase chain reaction (PCR) on genomic DNA or cDNA using primers capable of annealing to a nucleic acid sequence of interest; (4) computer searches of sequence databases for related sequences; and (5) differential screening of a subtracted nucleic acid library.

[0131] Nucleic acids encoding modified/variant AAV capsids may be maintained as DNA in any convenient cloning vector. In a one embodiment, clones are maintained in a plasmid cloning/expression vector, such as pBluescript (Stratagene, La Jolla, Calif.), which is propagated in a suitable E. coli host cell. Alternatively, nucleic acids may be maintained in vector suitable for expression in mammalian cells, for example, an AAV vector. In cases where post-translational modification affects coagulation function, nucleic acid molecule can be expressed in mammalian cells.

[0132] As disclosed herein, rAAV vectors may optionally comprise regulatory elements necessary for expression of the heterologous nucleic acid in a cell positioned in such a manner as to permit expression of the encoded protein in the host cell. Such regulatory elements required for expression include, but are not limited to, promoter sequences, enhancer sequences and transcription initiation sequences as set forth herein and known to the skilled artisan.

[0133] Methods and uses of the invention include delivering (transducing) nucleic acid (transgene) into host cells, including dividing and/or non-dividing cells. The nucleic acids, rAAV vector, methods, uses and pharmaceutical formulations of the invention are additionally useful in a method of delivering, administering or providing sequence encoded by heterologous nucleic acid to a subject in need thereof, as a method of treatment. In this manner, the nucleic acid is transcribed and a protein or inhibitory nucleic acid may be produced in vivo in a subject. The subject may benefit from or be in need of the protein or inhibitory nucleic acid because the subject has a deficiency of the protein, or because production of the protein or inhibitory nucleic acid in the subject may impart some therapeutic effect, as a method of treatment or otherwise. For example, an inhibitory nucleic acid can reduce expression or transcription of an aberrant deleterious protein that is expressed in a subject in which the apparent or deleterious protein causes a disease or disorder, such as a neurological disease or disorder.

[0134] rAAV vectors comprising an AAV genome with a heterologous nucleic acid permit the treatment of genetic diseases, e.g., a protein or enzyme deficiency, such as a GAA or FVIII deficiency. For deficiency state diseases, gene transfer can be used to bring a normal gene into affected tissues for replacement therapy, as well as to create animal models for the disease using antisense mutations. For unbalanced disease states, gene transfer could be used to create a disease state in a model system, which could then be used in efforts to counteract the disease state. The use of site-specific integration of nucleic acid sequences to correct defects is also possible.

[0135] In various embodiments, rAAV vectors comprising aa AAV genome with a heterologous nucleic acid may be used, for example, as therapeutic and/or prophylactic agents (protein or nucleic acid). In particular embodiments, the heterologous nucleic acid encodes a protein that can modulate the blood coagulation cascade.

[0136] For example, an encoded FVIII or hFVIII-BDD may have similar coagulation activity as wild-type FVIII, or altered coagulation activity compared to wild-type FVII. Administration of FVIII or hFVIII-BDD-encoding rAAV vectors to a patient results in the expression of FVIII or hFVIII-BDD protein which serves to normalize the coagulation cascade.

[0137] In additional embodiments, a heterologous nucleic acid encodes a protein (enzyme) that can inhibit or reduce the accumulation of glycogen, prevent the accumulation of glycogen or degrade glycogen. For example, an encoded GAA may have similar activity as wild-type GAA. Administration of GAA-encoding rAAV vectors to a patient with Pompe disease results in the expression of the GAA protein which serves to inhibit or reduce the accumulation of glycogen, prevent the accumulation of glycogen or degrade glycogen, which in turn can reduce or decrease one or more adverse effects of Pompe disease.

[0138] Non-limiting examples of diseases treatable in accordance with the invention include lung disease (e.g., cystic fibrosis), a bleeding disorder (e.g., hemophilia A or hemophilia B with or without inhibitors), thalassemia, a blood disorder (e.g., anemia), Alzheimer's disease, Parkinson's disease, Huntington's disease, amyotrophic lateral sclerosis (ALS), epilepsy, a lysosomal storage disease) e.g., aspartylglucosaminuria, Batten disease, late infantile neuronal ceroid lipofuscinosis type 2 (CLN2), cystinosis, Fabry disease, Gaucher disease types I, II, and III, glycogen storage disease II (Pompe disease), ganglioside monosialic 2 (GM2)-gangliosidosis type I (Tay Sachs disease), GM2-gangliosidosis type II (Sandhoff disease), mucolipidosis types I (sialidosis type I and II), II (I-cell disease), III (pseudo-Hurler disease) and IV, mucopolysaccharide storage diseases (Hurler disease and variants, Hunter, Sanfilippo Types A,B,C,D, Morquio Types A and B, Maroteaux-Lamy and Sly diseases), Niemann-Pick disease types A/B, C1 and C2, and Schindler disease types I and II), hereditary angioedema (HAE), a copper or iron accumulation disorder (e.g., Wilson's or Menkes disease), lysosomal acid lipase deficiency, a neurological or neurodegenerative disorder, cancer, type 1 or type 2 diabetes, adenosine deaminase deficiency, a metabolic defect (e.g., glycogen storage diseases), a disease of solid organs (e.g., brain, liver, kidney, heart), or an infectious viral (e.g., hepatitis B and C, human immunodeficiency virus (HIV), etc.), bacterial or fungal disease.

[0139] Additional non-limiting examples of diseases treatable in accordance with the invention include hemostasis related disorders or bleeding disorders such as hemophilia A, hemophilia A with inhibitory antibodies, hemophilia B, hemophilia B with inhibitory antibodies, a deficiency in any coagulation Factor: VII, VIII, IX, X, XI, V, XII, II, von Willebrand factor, combined FV/FVIII deficiency, thalassemia, vitamin K epoxide reductase C1 deficiency, or gamma-carboxylase deficiency; bleeding associated with trauma, injury, thrombosis, thrombocytopenia, stroke, coagulopathy, or disseminated intravascular coagulation (DIC); over-anticoagulation associated with heparin, low molecular weight heparin, pentasaccharide, warfarin, or small molecule antithrombotics (i.e., FXa inhibitors); and platelet disorders such as, Bernard Soulier syndrome, Glanzmann thrombasthenia, and storage pool deficiency.

[0140] Non-limiting examples of heterologous nucleic acids encoding gene products (e.g., therapeutic proteins) useful in accordance with the invention include, but are not limited to GAA (acid alpha-glucosidase) for treatment of Pompe disease; TPP1 (tripeptidyl peptidase-1) for treatment of late infantile neuronal ceroid lipofuscinosis type 2 (CLN2), ATP7B (copper transporting ATPase2) for treatment of Wilson's disease; alpha galactosidase for treatment of Fabry disease; ASS1 (arginosuccinate synthase) for treatment of citrullinemia type 1; beta-glucocerebrosidase for treatment of Gaucher disease type 1; beta-hexosaminidase A for treatment of Tay Sachs disease; SERPING1 (C1 protease inhibitor; C1 esterase inhibitor) for treatment of hereditary angioedema (HAE); glucose-6-phosphatase for treatment of glycogen storage disease type I (GSDI); erythropoietin (EPO) for treatment of anemia; interferon-alpha, interferon-beta, and interferon-gamma for treatment of various immune disorders, viral infections and cancer; an interleukin (IL), including any one of IL-1 through IL-36, and corresponding receptors, for treatment of various inflammatory diseases or immuno-deficiencies; a chemokine, including chemokine (C—X—C motif) ligand 5 (CXCL5) for treatment of immune disorders; granulocyte-colony stimulating factor (G-CSF) for treatment of immune disorders such as Crohn's disease; granulocyte-macrophage colony stimulating factor (GM-CSF) for treatment of various human inflammatory diseases; macrophage colony stimulating factor (M-CSF) for treatment of various human inflammatory diseases; keratinocyte growth factor (KGF) for treatment of epithelial tissue damage; chemokines such as monocyte chemoattractant protein-1 (MCP-1) for treatment of recurrent miscarriage, HIV-related complications, and insulin resistance; tumor necrosis factor (TNF) and receptors for treatment of various immune disorders; alphal-antitrypsin for treatment of emphysema or chronic obstructive pulmonary disease (COPD); alpha-L-iduronidase for treatment of mucopolysaccharidosis I (MPS I); ornithine transcarbamoylase (OTC) for treatment of OTC deficiency; phenylalanine hydroxylase (PAH) or phenylalanine ammonia-lyase (PAL) for treatment of phenylketonuria (PKU); lipoprotein lipase for treatment of lipoprotein lipase deficiency; apolipoproteins for treatment of apolipoprotein (Apo) A-I deficiency; low-density lipoprotein receptor (LDL-R) for treatment of familial hypercholesterolemia (FH); albumin for treatment of hypoalbuminemia; lecithin cholesterol acyltransferase (LCAT); carbamoyl synthetase I; argininosuccinate synthetase; argininosuccinate lyase; arginase; fumarylacetoacetate hydrolase; porphobilinogen deaminase; cystathionine beta-synthase for treatment of homocystinuria; branched chain ketoacid decarboxylase; isovaleryl-CoA dehydrogenase; propionyl CoA carboxylase; methylmalonyl-CoA mutase; glutaryl CoA dehydrogenase; insulin; pyruvate carboxylase; hepatic phosphorylase; phosphorylase kinase; glycine decarboxylase; H-protein; T-protein; cystic fibrosis transmembrane regulator (CFTR); and dystrophin.

[0141] In further embodiments, the heterologous polynucleotide encodes an antibody, β-globin, α-globin, spectrin, a metal transporter (ATP7A or ATP7), sulfamidase, arylsulfatase A (cerebroside-sulfatase; ARSA), hypoxanthine guanine phosphoribosyl transferase, β-25 glucocerebrosidase, sphingomyelinase, lysosomal hexosaminidase, branched-chain keto acid dehydrogenase, a hormone, a growth factor, insulin-like growth factor 1 or 2, platelet derived growth factor, epidermal growth factor, nerve growth factor, neurotrophic factor-3 and -4, brain-derived neurotrophic factor, glial derived growth factor, transforming growth factor α, transforming growth factor β, a cytokine, α-interferon, β-interferon, interferon-γ, interleukin-2, interleukin-4, interleukin-12, granulocyte-macrophage colony stimulating factor, lymphotoxin, a suicide gene product, herpes simplex virus thymidine kinase, cytosine deaminase, diphtheria toxin, cytochrome P450, deoxycytidine kinase, tumor necrosis factor, a drug resistance protein, a tumor suppressor protein (e.g., p53, Rb, Wt-1, NF1, Von Hippel-Lindau (VHL), adenomatous polyposis coli (APC)), a peptide with immunomodulatory properties, a tolerogenic or immunogenic peptide or protein Tregitope or hCDR1, glucokinase, guanylate cyclase 2D (LCA-GUCY2D), retinal pigment epithelium-specific 65 kDa protein (RPE65), Rab escort protein 1 (choroideremia), LCA 5 (LCA-lebercilin), ornithine ketoacid aminotransferase (gyrate atrophy), retinoschisin 1 (X-linked retinoschisis), USH1C (Usher's syndrome 1C), X-linked retinitis pigmentosa GTPase, MER proto-oncogene tyrosine kinase (MERTK), ABCA4, DFNB1 (connexin 26 deafness), ACHM 2, 3 and 4 (achromatopsia), PKD-1 or PKD-2 (polycystic kidney disease), a sulfatase, N-acetylglucosamine-1-phosphate transferase, cathepsin A, GM2-AP, NPC1, VPC2, a sphingolipid activator protein, one or more zinc finger nuclease for genome editing, and one or more donor sequence used as repair templates for genome editing.

[0142] In certain embodiments, the protein encoded by the heterologous polynucleotide comprises a gene editing nuclease. In certain aspects, the gene editing nuclease comprises a zinc finger nuclease (ZFN) or a transcription activator-like effector nuclease (TALEN). In certain aspects, the gene editing nuclease comprises a functional Type II CRISPR-Cas9.

[0143] In certain embodiments, the heterologous polynucleotide encodes an inhibitory nucleic acid. In certain aspects, the inhibitory nucleic acid is selected from the group consisting of a siRNA, an antisense molecule, miRNA, RNAi, a ribozyme and a shRNA. In certain aspects, the inhibitory nucleic acid binds to a gene, a transcript of a gene, or a transcript of a gene associated with a polynucleotide repeat disease including, but not limited to, a huntingtin (HTT) gene, a gene associated with dentatorubropallidoluysian atrophy (atrophin 1, ATN1), androgen receptor on the X chromosome in spinobulbar muscular atrophy, human Ataxin-1, -2, -3, and -7, Caᵥ2.1 P/Q voltage-dependent calcium channel (CACNA1A), TATA-binding protein, Ataxin 8 opposite strand (ATXN8OS), Serine/threonine-protein phosphatase 2A 55 kDa regulatory subunit B beta isoform in spinocerebellar ataxia (type 1, 2, 3, 6, 7, 8, 12 17), FMR1 (fragile X mental retardation 1) in fragile X syndrome, FMR1 (fragile X mental retardation 1) in fragile X-associated tremor/ataxia syndrome, FMR1 (fragile X mental retardation 2) or AF4/FMR2 family member 2 in fragile XE mental retardation; myotonin-protein kinase (MT-PK) in myotonic dystrophy; frataxin in Friedreich's ataxia; a mutant of superoxide dismutase 1 (SOD1) gene in amyotrophic lateral sclerosis; a gene involved in pathogenesis of Parkinson's disease and/or Alzheimer's disease; apolipoprotein B (APOB) and proprotein convertase subtilisin/kexin type 9 (PCSK9), hypercholesterolemia; HIV Tat, human immunodeficiency virus transactivator of transcription gene, in HIV infection; HIV TAR, HIV TAR, human immunodeficiency virus transactivator response element gene, in HIV infection; C—C chemokine receptor 5 (CCRS) in HIV infection; Rous sarcoma virus (RSV) nucleocapsid protein in RSV infection, liver-specific microRNA (miR-122) in hepatitis C virus infection; p53, acute kidney injury or delayed graft function kidney transplant or kidney injury acute renal failure; protein kinase N3 (PKN3) in advance recurrent or metastatic solid malignancies; LMP2, LMP2 also known as proteasome subunit beta-type 9 (PSMB 9), metastatic melanoma; LMP7, also known as proteasome subunit beta-type 8 (PSMB 8), metastatic melanoma; MECL1 also known as proteasome subunit beta-type 10 (PSMB 10), metastatic melanoma; vascular endothelial growth factor (VEGF) in solid tumors; kinesin spindle protein in solid tumors, apoptosis suppressor B-cell CLL/lymphoma (BCL-2) in chronic myeloid leukemia; ribonucleotide reductase M2 (RRM2) in solid tumors; Furin in solid tumors; polo-like kinase 1 (PLK1) in liver tumors, diacylglycerol acyltransferase 1 (DGAT1) in hepatitis C infection, beta-catenin in familial adenomatous polyposis; beta2 adrenergic receptor, glaucoma; RTP801/Reddl also known as DAN damage-inducible transcript 4 protein, in diabetic macular edema (DME) or age-related macular degeneration; vascular endothelial growth factor receptor I (VEGFR1) in age-related macular degeneration or choroidal neovascularization, caspase 2 in non-arteritic ischaemic optic neuropathy; keratin 6A N17K mutant protein in pachyonychia congenital; influenza A virus genome/gene sequences in influenza infection; severe acute respiratory syndrome (SARS) coronavirus genome/gene sequences in SARS infection; respiratory syncytial virus genome/gene sequences in respiratory syncytial virus infection; Ebola filovirus genome/gene sequence in Ebola infection; hepatitis B and C virus genome/gene sequences in hepatitis B and C infection; herpes simplex virus (HSV) genome/gene sequences in HSV infection, coxsackievirus B3 genome/gene sequences in coxsackievirus B3 infection; silencing of a pathogenic allele of a gene (allele-specific silencing) like torsin A (TOR1A) in primary dystonia, pan-class I and human leukocyte antigen (HLA)-allele specific in transplant; and mutant rhodopsin gene (RHO) in autosomal dominantly inherited retinitis pigmentosa (adRP).

[0144] rAAV vectors may be administered alone, or in combination with or more compound, agent, drug, treatment or other therapeutic regimen or protocol having a desired therapeutic, beneficial, additive, synergistic or complementary activity or effect. Exemplary combination compositions and treatments include second actives, such as, biologics (proteins), agents (e.g., immunosuppressive agents) and drugs. Such biologics (proteins), agents, drugs, treatments and therapies can be administered or performed prior to, substantially contemporaneously with or following any other method or use of the invention, for example, a therapeutic method of treating a subject for a blood clotting disease such as hemophilia A or a lysosomal storage disease such as Pompe disease.

[0145] According to the invention, rAAV vectors or a combination of therapeutic agents may be administered to a subject or patient alone or in a pharmaceutically acceptable or biologically compatible composition.

[0146] The compound, agent, drug, treatment or other therapeutic regimen or protocol can be administered as a combination composition, or administered separately, such as concurrently or in series or sequentially (prior to or following) delivery or administration of a nucleic acid, vector, recombinant vector (e.g., rAAV), or recombinant virus particle of the invention. The invention therefore provides combinations in which a method or use of the invention is in a combination with any compound, agent, drug, therapeutic regimen, treatment protocol, process, remedy or composition, set forth herein or known to one of skill in the art. The compound, agent, drug, therapeutic regimen, treatment protocol, process, remedy or composition can be administered or performed prior to, substantially contemporaneously with or following administration of a nucleic acid, vector, recombinant vector (e.g., rAAV), or recombinant virus particle of the invention, to a subject.

[0147] As set forth herein, rAAV are useful as gene therapy vectors as they can penetrate cells and introduce nucleic acid/genetic material into the cells. Because AAV are not associated with pathogenic disease in humans, rAAV vectors are able to deliver heterologous polynucleotide sequences (e.g., therapeutic proteins and agents) to human patients without causing substantial AAV pathogenesis or disease.

[0148] rAAV vectors possess a number of desirable features for such applications, including tropism for dividing and non-dividing cells. Early clinical experience with these vectors also demonstrated no sustained toxicity and immune responses were minimal or undetectable. AAV are known to infect a wide variety of cell types in vivo and in vitro by receptor-mediated endocytosis or by transcytosis. These vector systems have been tested in humans targeting many tissues, such as, retinal epithelium, liver, skeletal muscle, airways, brain, joints and hematopoietic stem cells.

[0149] It may be desirable to introduce a rAAV vector that can provide, for example, multiple copies of a desired gene and hence greater amounts of the product of that gene. Improved rAAV vectors and methods for producing these vectors have been described in detail in a number of references, patents, and patent applications, including: Wright J. F. (Hum Gene Ther 20:698-706, 2009).

[0150] Direct delivery of rAAV vectors or ex vivo transduction of human cells followed by infusion into the body will result in expression of the heterologous nucleic acid thereby exerting a beneficial therapeutic effect on hemostasis. In the context of blood coagulation factor, such as Factor VIII, administration enhances pro-coagulation activity. In the context of an enzyme, such as GAA, administration reduces the amount or accumulation of glycogen, prevents accumulation of glycogen or degrades glycogen. This, in turn, can reduce or decrease one or more adverse effects of Pompe disease such as promoting or improving muscle tone and/or muscle strength and/or reducing or decreasing enlarged liver.

[0151] Recombinant AAV vector, as well as methods and uses thereof, include any viral strain or serotype. As a non-limiting example, a recombinant AAV vector can be based upon any AAV genome, such as Spk100, Spk200, AAV-1, -2, -3, -4, -5, -6, -7, -8, -9, -10, -11, -12, -rh74, -rh10 or AAV3B, for example. Such vectors can be based on the same strain or serotype (or subgroup or variant), or be different from each other. As a non-limiting example, a recombinant AAV vector based upon a particular serotype genome can be identical to the serotype of the capsid proteins that package the vector. In addition, a recombinant AAV vector genome can be based upon an AAV serotype genome distinct from the serotype of the AAV capsid proteins that package the vector. For example, the AAV vector genome can be based upon AAV2, whereas at least one of the three capsid proteins could be a Spk100, Spk200, AAV1, AAV3, AAV4, AAV5, AAV6, AAV7, AAV8, AAV9, AAV10, AAV11, AAV12, Rh10, Rh74 or AAV3B as well as variants thereof as disclosed herein, for example. Such AAV capsid variants include the variants of AAV capsids set forth in WO2012/145601, WO2013/158879, WO2015/013313, WO2018/156654, US2013/0059732, U.S. Pat. Nos. 9,169,299, 7,749,492, and 9,587,282.

[0152] As used herein, the term “serotype” is a distinction used to refer to an AAV having a capsid that is serologically distinct from other AAV serotypes. Serologic distinctiveness is determined on the basis of the lack of cross-reactivity between antibodies to one AAV as compared to another AAV. Such cross-reactivity differences are usually due to differences in capsid protein sequences/antigenic determinants (e.g., due to VP1, VP2, and/or VP3 sequence differences of AAV serotypes). Despite the possibility that AAV variants including capsid variants may not be serologically distinct from a reference AAV or other AAV serotype, they differ by at least one nucleotide or amino acid residue compared to the reference or other AAV serotype.

[0153] Under the traditional definition, a serotype means that the virus of interest has been tested against serum specific for all existing and characterized serotypes for neutralizing activity and no antibodies have been found that neutralize the virus of interest. As more naturally occurring virus isolates of are discovered and/or capsid mutants generated, there may or may not be serological differences with any of the currently existing serotypes. Thus, in cases where the new virus (e.g., AAV) has no serological difference, this new virus (e.g., AAV) would be a subgroup or variant of the corresponding serotype. In many cases, serology testing for neutralizing activity has yet to be performed on mutant viruses with capsid sequence modifications to determine if they are of another serotype according to the traditional definition of serotype. Accordingly, for the sake of convenience and to avoid repetition, the term “serotype” broadly refers to both serologically distinct viruses (e.g., AAV) as well as viruses (e.g., AAV) that are not serologically distinct that may be within a subgroup or a variant of a given serotype.

[0154] As set forth herein, modified AAV capsid proteins and nucleic acids encoding the capsid proteins exhibit less than 100% sequence identity to a reference or parental AAV serotype such as Spk100, Spk200, AAV1, AAV2, AAV3, AAV4, AAV5, AAV6, AAV7, AAV8, AAV9, AAV10, AAV11, AAV12, Rh10, Rh74 or AAV3B, but are distinct from and not identical to known AAV genes or proteins, such as AAV1, AAV2, AAV3, AAV4, AAV5, AAV6, AAV7, AAV8, AAV9, AAV10, AAV11, AAV12, Rh10, Rh74 or AAV3B. In one embodiment, a modified/variant AAV capsid protein includes or consists of a sequence at least 80%, 85%, 85%, 87%, 88%, 89%, 90%, 91%, 92%, 93%, 94%, 95%, 96%, 97%, 98%, 99%, 99.1%, 99.2%, 99.3%, 99.4%, 99.5%, etc., up to 99.9% identical to a reference or parental AAV capsid protein, such as Spk100, Spk200, AAV1, AAV2, AAV3, AAV4, AAV5, AAV6, AAV7, AAV8, AAV9, AAV10, AAV11, AAV12, Rh10, Rh74 or AAV3B, as well as variants of Spk100, Spk200, AAV1, AAV2, AAV3, AAV4, AAV5, AAV6, AAV7, AAV8, AAV9, AAV10, AAV11, AAV12, Rh10, Rh74 and AAV3B.

[0155] In certain embodiments, a modified/variant AAV capsid protein has 1, 2, 3, 4, 5, 5-10, 10-15, 15-20 or more amino acid substitutions. In certain embodiments, a modified/variant AAV capsid protein has a peptide insertion length of 2, 3, 4, 5, 5-10, 10-15, 15-20, 20-25, 25-30, 30-35, 35-40, 40-50 or 50-60 amino acids.

[0156] rAAV vectors may be administered to a patient via infusion in a biologically compatible carrier, for example, via intravenous injection. The rAAV vectors may optionally be encapsulated into liposomes or mixed with other phospholipids or micelles to increase stability of the molecule.

[0157] In accordance with the invention, rAAV vectors may be administered alone or in combination with other. Accordingly, rAAV vectors and other compositions, agents, drugs, biologics (proteins) can be incorporated into pharmaceutical compositions. Such pharmaceutical compositions are useful for, among other things, administration and delivery to a subject in vivo or ex vivo.

[0158] In particular embodiments, pharmaceutical compositions also contain a pharmaceutically acceptable carrier or excipient. Such excipients include any pharmaceutical agent that does not itself induce an immune response harmful to the individual receiving the composition, and which may be administered without undue toxicity.

[0159] As used herein the term “pharmaceutically acceptable” and “physiologically acceptable” mean a biologically acceptable formulation, gaseous, liquid or solid, or mixture thereof, which is suitable for one or more routes of administration, in vivo delivery or contact. A “pharmaceutically acceptable” or “physiologically acceptable” composition is a material that is not biologically or otherwise undesirable, e.g., the material may be administered to a subject without causing substantial undesirable biological effects. Thus, such a pharmaceutical composition may be used, for example in administering a nucleic acid, vector, viral particle or protein to a subject.

[0160] Pharmaceutically acceptable excipients include, but are not limited to, liquids such as water, saline, glycerol, sugars and ethanol. Pharmaceutically acceptable salts can also be included therein, for example, mineral acid salts such as hydrochlorides, hydrobromides, phosphates, sulfates, and the like; and the salts of organic acids such as acetates, propionates, malonates, benzoates, and the like. Additionally, auxiliary substances, such as wetting or emulsifying agents, pH buffering substances, and the like, may be present in such vehicles.

[0161] The pharmaceutical composition may be provided as a salt and can be formed with many acids, including but not limited to, hydrochloric, sulfuric, acetic, lactic, tartaric, malic, succinic, etc. Salts tend to be more soluble in aqueous or other protonic solvents than are the corresponding, free base forms. In other cases, a preparation may be a lyophilized powder which may contain any or all of the following: 1-50 mM histidine, 0.1%-2% sucrose, and 2-7% mannitol, at a pH range of 4.5 to 5.5, that is combined with buffer prior to use.

[0162] Pharmaceutical compositions include solvents (aqueous or non-aqueous), solutions (aqueous or non-aqueous), emulsions (e.g., oil-in-water or water-in-oil), suspensions, syrups, elixirs, dispersion and suspension media, coatings, isotonic and absorption promoting or delaying agents, compatible with pharmaceutical administration or in vivo contact or delivery. Aqueous and non-aqueous solvents, solutions and suspensions may include suspending agents and thickening agents. Such pharmaceutically acceptable carriers include tablets (coated or uncoated), capsules (hard or soft), microbeads, powder, granules and crystals. Supplementary active compounds (e.g., preservatives, antibacterial, antiviral and antifungal agents) can also be incorporated into the compositions.

[0163] Pharmaceutical compositions can be formulated to be compatible with a particular route of administration or delivery, as set forth herein or known to one of skill in the art. Thus, pharmaceutical compositions include carriers, diluents, or excipients suitable for administration by various routes.

[0164] Compositions suitable for parenteral administration comprise aqueous and non-aqueous solutions, suspensions or emulsions of the active compound, which preparations are typically sterile and can be isotonic with the blood of the intended recipient. Non-limiting illustrative examples include water, buffered saline, Hanks' solution, Ringer's solution, dextrose, fructose, ethanol, animal, vegetable or synthetic oils. Aqueous injection suspensions may contain substances which increase the viscosity of the suspension, such as sodium carboxymethyl cellulose, sorbitol, or dextran.

[0165] Additionally, suspensions of the active compounds may be prepared as appropriate oil injection suspensions. Suitable lipophilic solvents or vehicles include fatty oils such as sesame oil, or synthetic fatty acid esters, such as ethyl oleate or triglycerides, or liposomes. Optionally, the suspension may also contain suitable stabilizers or agents which increase the solubility of the compounds to allow for the preparation of highly concentrated solutions.

[0166] Cosolvents and adjuvants may be added to the formulation. Non-limiting examples of cosolvents contain hydroxyl groups or other polar groups, for example, alcohols, such as isopropyl alcohol; glycols, such as propylene glycol, polyethyleneglycol, polypropylene glycol, glycol ether; glycerol; polyoxyethylene alcohols and polyoxyethylene fatty acid esters. Adjuvants include, for example, surfactants such as, soya lecithin and oleic acid; sorbitan esters such as sorbitan trioleate; and polyvinylpyrrolidone.

[0167] After pharmaceutical compositions have been prepared, they may be placed in an appropriate container and labeled for treatment. Such labeling could include amount, frequency, and method of administration.

[0168] Pharmaceutical compositions and delivery systems appropriate for the compositions, methods and uses of the invention are known in the art (see, e.g., Remington: The Science and Practice of Pharmacy (2003) 20^{th} ed., Mack Publishing Co., Easton, Pa.; Remington's Pharmaceutical Sciences (1990) 18^{th} ed., Mack Publishing Co., Easton, Pa.; The Merck Index (1996) 12^{th} ed., Merck Publishing Group, Whitehouse, N.J.; Pharmaceutical Principles of Solid Dosage Forms (1993), Technonic Publishing Co., Inc., Lancaster, Pa.; Ansel and Stoklosa, Pharmaceutical Calculations (2001) 11^{th} ed., Lippincott Williams & Wilkins, Baltimore, Md.; and Poznansky et al., Drug Delivery Systems (1980), R. L. Juliano, ed., Oxford, N.Y., pp. 253-315).

[0169] An “effective amount” or “sufficient amount” refers to an amount that provides, in single or multiple doses, alone or in combination, with one or more other compositions (therapeutic or immunosuppresive agents such as a drug), treatments, protocols, or therapeutic regimens agents, a detectable response of any duration of time (long or short term), an expected or desired outcome in or a benefit to a subject of any measurable or detectable degree or for any duration of time (e.g., for minutes, hours, days, months, years, or cured).

[0170] Doses can vary and depend upon the type, onset, progression, severity, frequency, duration, or probability of the disease to which treatment is directed, the clinical endpoint desired, previous or simultaneous treatments, the general health, age, gender, race or immunological competency of the subject and other factors that will be appreciated by the skilled artisan. The dose amount, number, frequency or duration may be proportionally increased or reduced, as indicated by any adverse side effects, complications or other risk factors of the treatment or therapy and the status of the subject. The skilled artisan will appreciate the factors that may influence the dosage and timing required to provide an amount sufficient for providing a therapeutic or prophylactic benefit.

[0171] The dose to achieve a therapeutic effect, e.g., the dose in vector genomes/per kilogram of body weight (vg/kg), will vary based on several factors including, but not limited to: route of administration, the level of heterologous polynucleotide expression required to achieve a therapeutic effect, the specific disease treated, any host immune response to the viral vector, a host immune response to the heterologous polynucleotide or expression product (protein), and the stability of the protein expressed. One skilled in the art can determine a rAAV/vector genome dose range to treat a patient having a particular disease or disorder based on the aforementioned factors, as well as other factors.

[0172] Generally, doses will range from at least 1×10⁸ vector genomes per kilogram (vg/kg) of the weight of the subject, or more, for example, 1×10⁹, 1×10¹⁰, 1×10¹¹, 1×10¹², 1×10¹³ or 1×10¹⁴, or more, vector genomes per kilogram (vg/kg) of the weight of the subject, to achieve a therapeutic effect. An rAAV dose in the range of 1×10¹⁰-1×10¹¹ vg/kg in mice, and 1×10¹²-1×10¹³ vg/kg in dogs have been effective. Doses can be less, for example, a dose of less than 6×10¹² vg/kg. More particularly, a dose of 5×10¹¹ vg/kg or 1×10¹² vg/kg.

[0173] rAAV vector doses can be at a level, typically at the lower end of the dose spectrum, such that there is not a substantial immune response against the heterologous nucleic acid sequence, the encoded protein or inhibitory nucleic acid, or rAAV vector. More particularly, a dose of up to but less than 6×10¹² vg/kg, such as about 5×10¹¹ to about 5×10¹² vg/kg, or more particularly, about 5×10¹¹ vg/kg or about 1×10¹² vg/kg.

[0174] The doses of an “effective amount” or “sufficient amount” for treatment (e.g., to ameliorate or to provide a therapeutic benefit or improvement) typically are effective to provide a response to one, multiple or all adverse symptoms, consequences or complications of the disease, one or more adverse symptoms, disorders, illnesses, pathologies, or complications, for example, caused by or associated with the disease, to a measurable extent, although decreasing, reducing, inhibiting, suppressing, limiting or controlling progression or worsening of the disease is a satisfactory outcome.

[0175] An effective amount or a sufficient amount can but need not be provided in a single administration, may require multiple administrations, and, can but need not be, administered alone or in combination with another composition (e.g., agent), treatment, protocol or therapeutic regimen. For example, the amount may be proportionally increased as indicated by the need of the subject, type, status and severity of the disease treated or side effects (if any) of treatment. In addition, an effective amount or a sufficient amount need not be effective or sufficient if given in single or multiple doses without a second composition (e.g., another drug or agent), treatment, protocol or therapeutic regimen, since additional doses, amounts or duration above and beyond such doses, or additional compositions (e.g., drugs or agents), treatments, protocols or therapeutic regimens may be included in order to be considered effective or sufficient in a given subject. Amounts considered effective also include amounts that result in a reduction of the use of another treatment, therapeutic regimen or protocol, such as administration of recombinant enzyme (e.g., GAA) for treatment of an enzyme deficiency (e.g., Pompe disease) or administration of recombinant clotting factor protein for treatment of a clotting disorder, e.g., FVIII for treatment of hemophilia A with or without inhibitors, or FIX for treatment of hemophilia B with or without inhibitors.

[0176] Accordingly, methods and uses of the invention also include, among other things, methods and uses that result in a reduced need or use of another compound, agent, drug, therapeutic regimen, treatment protocol, process, or remedy. For example, for protein/enzyme deficiency (e.g., GAA), or a clotting factor (e.g., Factor VIII or Factor IX), a method or use of the invention has a therapeutic benefit if, in a given subject, a less frequent or reduced dose or elimination of administration of a recombinant protein/enzyme (e.g., GAA) or clotting factor (e.g., Factor VIII or Factor IX) to supplement for the deficient or defective protein in the subject. Thus, in accordance with the invention, methods and uses of reducing need or use of another treatment or therapy are provided.

[0177] An effective amount or a sufficient amount need not be effective in each and every subject treated, nor a majority of treated subjects in a given group or population. An effective amount or a sufficient amount means effectiveness or sufficiency in a particular subject, not a group or the general population. As is typical for such methods, some subjects will exhibit a greater response, or less or no response to a given treatment method or use.

[0178] The term “ameliorate” means a detectable or measurable improvement in a subject's disease or symptom thereof, or an underlying cellular response. A detectable or measurable improvement includes a subjective or objective decrease, reduction, inhibition, suppression, limit or control in the occurrence, frequency, severity, progression, or duration of the disease, or complication caused by or associated with the disease, or an improvement in a symptom or an underlying cause or a consequence of the disease, or a reversal of the disease.

[0179] For Pompe disease, an effective amount would be an amount of GAA that inhibits or reduces glycogen production or accumulation, enhances or increases glycogen degradation or removal, or improves muscle tone and/or muscle strength in a subject, for example. For hemophilia A, an effective amount would be an amount that reduces frequency or severity of acute bleeding episodes in a subject, for example, or an amount that reduces clotting time as measured by a clotting assay, for example.

[0180] Therapeutic doses will depend on, among other factors, the age and general condition of the subject, the severity of the disease or disorder. A therapeutically effective amount in humans will fall in a relatively broad range that may be determined by a medical practitioner based on the response of an individual patient.

[0181] Compositions such as pharmaceutical compositions may be delivered to a subject, so as to allow production of the encoded protein or inhibitory nucleic acid. In a particular embodiment, pharmaceutical compositions comprise sufficient genetic material to enable a recipient to produce a therapeutically effective amount of a protein or inhibitory nucleic acid in the subject.

[0182] The compositions may be administered alone. In certain embodiments, a recombinant AAV particle provides a therapeutic effect without an immunosuppressive agent. The therapeutic effect optionally is sustained for a period of time, e.g., 2-4, 4-6, 6-8, 8-10, 10-14, 14-20, 20-25, 25-30, or 30-50 days or more, for example, 50-75, 75-100, 100-150, 150-200 days or more without administering an immunosuppressive agent. Accordingly, a therapeutic effect is provided for a period of time.

[0183] The compositions may be administered in combination with at least one other agent. In certain embodiments, rAAV vector is administered in conjunction with one or more immunosuppressive agents prior to, substantially at the same time or after administering a rAAV vector. In certain embodiments, e.g., 1-12, 12-24 or 24-48 hours, or 2-4, 4-6, 6-8, 8-10, 10-14, 14-20, 20-25, 25-30, 30-50, or more than 50 days following administering rAAV vector. Such administration of immunosuppressive agents after a period of time following administering rAAV vector if there is a decrease in the encoded protein or inhibitory nucleic acid after the initial expression levels for a period of time, e.g., 20-25, 25-30, 30-50, 50-75, 75-100, 100-150, 150-200 or more than 200 days following rAAV vector.

[0184] In certain embodiments, an immunosuppressive agent is an anti-inflammatory agent. In certain embodiments, an immunosuppressive agent is a steroid. In certain embodiments, an immunosuppressive agent is cyclosporine (e.g., cyclosporine A), mycophenolate, Rituximab or a derivative thereof. Additional particular agents include a stabilizing compound.

[0185] Compositions may be formulated and/or administered in any sterile, biocompatible pharmaceutical carrier, including, but not limited to, saline, buffered saline, dextrose, and water. The compositions may be formulated and/or administered to a patient alone, or in combination with other agents (e.g., co-factors). For example, in the case of a blood clotting disorder such as hemophilia A with or without inhibitors or hemophilia B with or without inhibitors, the compositions may be formulated with other agents that influence hemostasis.

[0186] Methods and uses of the invention include delivery and administration systemically, regionally or locally, or by any route, for example, by injection or infusion. Delivery of the pharmaceutical compositions in vivo may generally be accomplished via injection using a conventional syringe, although other delivery methods such as convection-enhanced delivery are envisioned (See e.g., U.S. Pat. No. 5,720,720). For example, compositions may be delivered subcutaneously, epidermally, intradermally, intrathecally, intraorbitally, intramucosally, intraperitoneally, intravenously, intra-pleurally, intraarterially, orally, intranasally, intrahepatically, via the portal vein, or intramuscularly. Other modes of administration include oral and pulmonary administration, suppositories, and transdermal applications. A clinician specializing in the treatment of patients with, for example, blood coagulation disorders may determine the optimal route for administration of the adeno-associated viral vectors based on a number of criteria, including, but not limited to: the condition of the patient and the purpose of the treatment (e.g., enhanced or reduced blood coagulation).

[0187] Invention rAAV vectors, methods and uses can be combined with any compound, agent, drug, treatment or other therapeutic regimen or protocol having a desired therapeutic, beneficial, additive, synergistic or complementary activity or effect. Exemplary combination compositions and treatments include second actives, such as, biologics (proteins), agents (e.g., immunosuppressive agents) and drugs. Such biologics (proteins), agents, drugs, treatments and therapies can be administered or performed prior to, substantially contemporaneously with or following any other method or use of the invention.

[0188] The compound, agent, drug, treatment or other therapeutic regimen or protocol can be administered as a combination composition, or administered separately, such as concurrently or in series or sequentially (prior to or following) delivery or administration of a nucleic acid, vector, or rAAV particle. The invention therefore provides combinations in which a method or use of the invention is in a combination with any compound, agent, drug, therapeutic regimen, treatment protocol, process, remedy or composition, set forth herein or known to one of skill in the art. The compound, agent, drug, therapeutic regimen, treatment protocol, process, remedy or composition can be administered or performed prior to, substantially contemporaneously with or following administration of a nucleic acid, vector or rAAV particle of the invention, to a subject.

[0189] The invention is useful in animals including human and veterinary medical applications. Suitable subjects therefore include mammals, such as humans, as well as non-human mammals. The term “subject” refers to an animal, typically a mammal, such as humans, non-human primates (apes, gibbons, gorillas, chimpanzees, orangutans, macaques), a domestic animal (dogs and cats), a farm animal (poultry such as chickens and ducks, horses, cows, goats, sheep, pigs), and experimental animals (mouse, rat, rabbit, guinea pig). Human subjects include fetal, neonatal, infant, juvenile and adult subjects. Subjects include animal disease models, for example, mouse and other animal models of protein/enzyme deficiencies such as Pompe disease, blood clotting diseases such as HemA and others known to those of skill in the art.

[0190] Subjects appropriate for treatment in accordance with the invention include those having or at risk of producing an insufficient amount or having a deficiency in a functional gene product (e.g., GAA or FVIII protein), or produce an aberrant, partially functional or non-functional gene product (e.g., GAA or FVIII protein), which can lead to disease. Subjects appropriate for treatment in accordance with the invention also include those having or at risk of producing an aberrant, or defective (mutant) gene product (protein) that leads to a disease such that reducing amounts, expression or function of the aberrant, or defective (mutant) gene product (protein) would lead to treatment of the disease, or reduce one or more symptoms or ameliorate the disease.

[0191] Subjects can be tested for an immune response, e.g., antibodies against AAV. Candidate subjects can therefore be screened prior to treatment according to a method of the invention. Subjects also can be tested for antibodies against AAV after treatment, and optionally monitored for a period of time after treatment. Subjects developing AAV antibodies can be treated with an immunosuppressive agent, or can be administered one or more additional amounts of AAV vector.

[0192] Subjects appropriate for treatment in accordance with the invention also include those having or at risk of producing antibodies against AAV. rAAV vectors can be administered or delivered to such subjects using several techniques. For example, AAV empty capsid (i.e., AAV lacking a heterologous nucleic acid) can be delivered to bind to the AAV antibodies in the subject thereby allowing the rAAV vector comprising the heterologous nucleic acid to transduce cells of the subject.

[0193] Ratio of AAV empty capsids to the rAAV vector can be between about 2:1 to about 50:1, or between about 2:1 to about 25:1, or between about 2:1 to about 20:1, or between about 2:1 to about 15:1, or between about 2:1 to about 10:1. Ratios can also be about 2:1, 3:1, 4:1, 5:1, 6:1, 7:1, 8:1, 9:1, or 10:1.

[0194] Amounts of AAV empty capsids to administer can be calibrated based upon the amount (titer) of AAV antibodies produced in a particular subject. AAV empty capsids can be of any serotype, for example, Spk100, Spk200, AAV1, AAV2, AAV3, AAV4, AAV5, AAV6, AAV7, AAV8, AAV9, AAV10, AAV11, AAV12, Rh10, Rh74, AAV3B or variants thereof as described herein.

[0195] Alternatively, or in addition to, rAAV vector can be delivered by direct intramuscular injection (e.g., one or more slow-twitch fibers of a muscle). In another alternative, a catheter introduced into the femoral artery can be used to delivery rAAV vectors to liver via the hepatic artery. Non-surgical means can also be employed, such as endoscopic retrograde cholangiopancreatography (ERCP), to deliver rAAV vectors directly to the liver, thereby bypassing the bloodstream and AAV antibodies. Other ductal systems, such as the ducts of the submandibular gland, can also be used as portals for delivering rAAV vectors into a subject that develops or has preexisting anti-AAV antibodies.

[0196] Administration or in vivo delivery to a subject can be performed prior to development of an adverse symptom, condition, complication, etc. caused by or associated with the disease. For example, a screen (e.g., genetic) can be used to identify such subjects as candidates for invention compositions, methods and uses. Such subjects therefore include those screened positive for an insufficient amount or a deficiency in a functional gene product (e.g., GAA or FVIII protein), or that produce an aberrant, partially functional or non-functional gene product (e.g., GAA or FVIII protein).

[0197] Administration or in vivo delivery to a subject in accordance with the methods and uses of the invention as disclosed herein can be practiced within 1-2, 2-4, 4-12, 12-24 or 24-72 hours after a subject has been identified as having the disease targeted for treatment, has one or more symptoms of the disease, or has been screened and is identified as positive as set forth herein even though the subject does not have one or more symptoms of the disease. Of course, methods and uses of the invention can be practiced 1-7, 7-14, 14-24, 24-48, 48-64 or more days, months or years after a subject has been identified as having the disease targeted for treatment, has one or more symptoms of the disease, or has been screened and is identified as positive as set forth herein.

[0198] A “unit dosage form” as used herein refers to physically discrete units suited as unitary dosages for the subject to be treated; each unit containing a predetermined quantity optionally in association with a pharmaceutical carrier (excipient, diluent, vehicle or filling agent) which, when administered in one or more doses, is calculated to produce a desired effect (e.g., prophylactic or therapeutic effect). Unit dosage forms may be within, for example, ampules and vials, which may include a liquid composition, or a composition in a freeze-dried or lyophilized state; a sterile liquid carrier, for example, can be added prior to administration or delivery in vivo. Individual unit dosage forms can be included in multi-dose kits or containers. rAAV particles, and pharmaceutical compositions thereof can be packaged in single or multiple unit dosage form for ease of administration and uniformity of dosage.

[0199] Subjects can be tested for protein activity to determine if such subjects are appropriate for treatment according to a method of the invention. Subjects also can be tested for amounts of protein according to a method of the invention. Such treated subjects can be monitored after treatment periodically, e.g., every 1-4 weeks, 1-6 months, 6-12 months, or 1, 2, 3, 4, 5 or more years.

[0200] Subjects can be tested for one or more liver enzymes for an adverse response or to determine if such subjects are appropriate for treatment according to a method of the invention. Candidate subjects can therefore be screened for amounts of one or more liver enzymes prior to treatment according to a method of the invention. Subjects also can be tested for amounts of one or more liver enzymes after treatment according to a method of the invention. Such treated subjects can be monitored after treatment for elevated liver enzymes, periodically, e.g., every 1-4 weeks, 1-6 months, 6-12 months, or 1, 2, 3, 4, 5 or more years.

[0201] Exemplary liver enzymes include alanine aminotransferase (ALT), aspartate aminotransferase (AST), and lactate dehydrogenase (LDH), but other enzymes indicative of liver damage can also be monitored. A normal level of these enzymes in the circulation is typically defined as a range that has an upper level, above which the enzyme level is considered elevated, and therefore indicative of liver damage. A normal range depends in part on the standards used by the clinical laboratory conducting the assay.

[0202] The invention provides kits with packaging material and one or more components therein. A kit typically includes a label or packaging insert including a description of the components or instructions for use in vitro, in vivo, or ex vivo, of the components therein. A kit can contain a collection of such components, e.g., a rAAV particle and optionally a second active, such as another compound, agent, drug or composition.

[0203] A kit refers to a physical structure housing one or more components of the kit. Packaging material can maintain the components sterilely, and can be made of material commonly used for such purposes (e.g., paper, corrugated fiber, glass, plastic, foil, ampules, vials, tubes, etc.).

[0204] Labels or inserts can include identifying information of one or more components therein, dose amounts, clinical pharmacology of the active ingredient(s) including mechanism of action, pharmacokinetics and pharmacodynamics. Labels or inserts can include information identifying manufacturer, lot numbers, manufacture location and date, expiration dates. Labels or inserts can include information identifying manufacturer information, lot numbers, manufacturer location and date. Labels or inserts can include information on a disease for which a kit component may be used. Labels or inserts can include instructions for the clinician or subject for using one or more of the kit components in a method, use, or treatment protocol or therapeutic regimen. Instructions can include dosage amounts, frequency or duration, and instructions for practicing any of the methods, uses, treatment protocols or prophylactic or therapeutic regimes described herein.

[0205] Labels or inserts can include information on any benefit that a component may provide, such as a prophylactic or therapeutic benefit. Labels or inserts can include information on potential adverse side effects, complications or reactions, such as warnings to the subject or clinician regarding situations where it would not be appropriate to use a particular composition. Adverse side effects or complications could also occur when the subject has, will be or is currently taking one or more other medications that may be incompatible with the composition, or the subject has, will be or is currently undergoing another treatment protocol or therapeutic regimen which would be incompatible with the composition and, therefore, instructions could include information regarding such incompatibilities.

[0206] Labels or inserts include “printed matter,” e.g., paper or cardboard, or separate or affixed to a component, a kit or packing material (e.g., a box), or attached to an ampule, tube or vial containing a kit component. Labels or inserts can additionally include a computer readable medium, such as a bar-coded printed label, a disk, optical disk such as CD- or DVD-ROM/RAM, DVD, MP3, magnetic tape, or an electrical storage media such as RAM and ROM or hybrids of these such as magnetic/optical storage media, FLASH media or memory type cards.

[0207] Unless otherwise defined, all technical and scientific terms used herein have the same meaning as commonly understood by one of ordinary skill in the art to which this invention belongs. Although methods and materials similar or equivalent to those described herein can be used in the practice or testing of the present invention, suitable methods and materials are described herein.

[0208] All patents, patent applications, publications, and other references, GenBank citations and ATCC citations cited herein are incorporated by reference in their entirety. In case of conflict, the specification, including definitions, will control.

[0209] Various terms relating to the biological molecules of the invention are used hereinabove and also throughout the specification and claims.

[0210] All of the features disclosed herein may be combined in any combination. Each feature disclosed in the specification may be replaced by an alternative feature serving a same, equivalent, or similar purpose. Thus, unless expressly stated otherwise, disclosed features (e.g., modified/variant AAV capsid proteins, rAAV particles comprising modified/variant AAV capsid proteins) are an example of a genus of equivalent or similar features.

[0211] As used herein, the singular forms “a”, “and,” and “the” include plural referents unless the context clearly indicates otherwise. Thus, for example, reference to “a nucleic acid” includes a plurality of such nucleic acids, reference to “a vector” includes a plurality of such vectors, and reference to “a virus” or “particle” includes a plurality of such viruses/particles.

[0212] As used herein, all numerical values or numerical ranges include integers within such ranges and fractions of the values or the integers within ranges unless the context clearly indicates otherwise. Thus, to illustrate, reference to 80% or more identity, includes 81%, 82%, 83%, 84%, 85%, 86%, 87%, 88%, 89%, 90%, 91%, 92%, 93%, 94%, etc., as well as 81.1%, 81.2%, 81.3%, 81.4%, 81.5%, etc., 82.1%, 82.2%, 82.3%, 82.4%, 82.5%, etc., and so forth.

[0213] Reference to an integer with more (greater) or less than includes any number greater or less than the reference number, respectively. Thus, for example, a reference to less than 100, includes 99, 98, 97, etc. all the way down to the number one (1); and less than 10, includes 9, 8, 7, etc. all the way down to the number one (1).

[0214] As used herein, all numerical values or ranges include fractions of the values and integers within such ranges and fractions of the integers within such ranges unless the context clearly indicates otherwise. Thus, to illustrate, reference to a numerical range, such as 1-10 includes 1, 2, 3, 4, 5, 6, 7, 8, 9, 10, as well as 1.1, 1.2, 1.3, 1.4, 1.5, etc., and so forth. Reference to a range of 1-50 therefore includes 1, 2, 3, 4, 5, 6, 7, 8, 9, 10, 11, 12, 13, 14, 15, 16, 17, 18, 19, 20, etc., up to and including 50, as well as 1.1, 1.2, 1.3, 1.4, 1.5, etc., 2.1, 2.2, 2.3, 2.4, 2.5, etc., and so forth.

[0215] Reference to a series of ranges includes ranges which combine the values of the boundaries of different ranges within the series. Thus, to illustrate reference to a series of ranges, for example, of 1-10, 10-20, 20-30, 30-40, 40-50, 50-60, 60-75, 75-100, 100-150, 150-200, 200-250, 250-300, 300-400, 400-500, 500-750, 750-850, includes ranges of 1-20, 1-30, 1-40, 1-50, 1-60, 10-30, 10-40, 10-50, 10-60, 10-70, 10-80, 20-40, 20-50, 20-60, 20-70, 20-80, 20-90, 50-75, 50-100, 50-150, 50-200, 50-250, 100-200, 100-250, 100-300, 100-350, 100-400, 100-500, 150-250, 150-300, 150-350, 150-400, 150-450, 150-500, etc.

[0216] The invention is generally disclosed herein using affirmative language to describe the numerous embodiments and aspects. The invention also specifically includes embodiments in which particular subject matter is excluded, in full or in part, such as substances or materials, method steps and conditions, protocols, or procedures. For example, in certain embodiments or aspects of the invention, materials and/or method steps are excluded. Thus, even though the invention is generally not expressed herein in terms of what the invention does not include aspects that are not expressly excluded in the invention are nevertheless disclosed herein.

[0217] A number of embodiments of the invention have been described. Nevertheless, one skilled in the art, without departing from the spirit and scope of the invention, can make various changes and modifications of the invention to adapt it to various usages and conditions. Accordingly, the following examples are intended to illustrate but not limit the scope of the invention claimed in any way.

### Example 1

### Materials and Methods

### Cloning of the Plasmids:

[0218] The Gibson Assembly® method was used to produce the rep/cap plasmids having the modified capsid sequences with substitutions or insertions. DNA fragments used for the Gibson Assembly using NEBuilder® HiFi DNA Assembly Cloning Kit (New England Biolabs, Cat #E5520) were produced either via PCR of the parental plasmids, or ordered as gBlocks Gene Fragments from Integrated DNA Technologies. A Rep plasmid having cap sequences removed by restriction digestion was used as a backbone. The manufacturer's protocol was followed to produce the rep/cap plasmids. Several colonies from the LB plate were selected and grown overnight. The plasmids were isolated using plasmid mini prep kit (Qiagen, QIAprep® Spin Miniprep Kit, Cat #27104) and sequenced to verify the presence of the expected inserts or mutations. The selected clones with the expected inserts or mutations were further sequenced to ensure the sequence of the rest of the rep and cap genes. The selected clones were used for production of rAAV particles in small scale.

[0219] For the plasmids having transgene constructs, Renilla luciferase or Factor IX (FIX) were used as the transgene, with a Renilla luciferase gene under the control of the CAG promoter, and the FIX gene under the control of the human alpha 1-antitrypsin (hAAT) promoter.

### Small Scale Production of AAV

[0220] HEK293 cells were seeded into 6-well plates one day before the transfection. On the day of transfection, cells at 70-90% confluency were treated with a DNA-PEI mixture. Specifically, for each well, 3 μg of total DNA (1 μg of each of the helper plasmid, transgene plasmid and rep/cap plasmid) mixed with 6 μg of polyethylenimine (PEI) was used. Upon incubating the cells with DNA-PEI mixture overnight, the cell culture medium was replaced the following day. After medium replacement, the cells were grown 2 more days and the AAV viral particles were collected. For the rAAV in the cytosol, the cells were resuspended in PBS or the cell culture medium they were growing in and the suspension was transferred to 1.5 ml tubes. Instead of a detergent solvent, the cells were lysed by freeze and thaw cycles. The samples were frozen in dry ice and rapidly thawed in 37° C. water bath. The cells were transferred to dry ice as soon as they were thawed at 37° C. to prevent any possible degradation of the capsids. Before putting the samples on dry ice, the samples were vortexed to enhance the cell degradation and release of the viral particles. At the end of the 4^{th} freeze and thaw cycle, the samples were spun down at 12,000 rpm for 10 minutes with a tabletop centrifuge set to 4° C. The supernatant that contains the rAAV was transferred to a fresh tube.

### Qpcr Analysis:

[0221] While the actual samples were kept on ice for the transduction studies, small aliquots of the samples were diluted into separate tubes to be used for qPCR analysis. 2-5 μl of cell extract samples containing rAAV were diluted in ddH₂O to achieve 50- to 200-fold dilutions. The boiled samples and standards were used in three technical replicates in the assays. The transgene-containing plasmids that were used for rAAV production were used as standards. For the construct with the FIX transgene, primers ApoE-FWD (5′-TTGTCCTGGCGTGGTTTAG-3′; SEQ ID NO:127) and ApoE-REV (5′-TGCAGAATCCTTAGTGGCTG-3′; SEQ ID NO:128) were used with the probe (5′-/56-FAM/TCCACTGGT/ZEN/AGCAAGATCCCCG/3IABkFQ/-3′; SEQ ID NO:129). For the construct with the Renilla luciferase transgene, primers Renluc-FWD (5′-AGGCCGCGTTACCATGTAAA-3′; SEQ ID NO:130) and Renluc-REV (5′-TGATAACTGGTCCGCAGTGG-3′; SEQ ID NO:131) were used with the probe (5′/56-FAM/TGGGCCAGA/ZEN/TGTAAACAAATGA/3IABkFQ/-3′; SEQ ID NO:132). The qPCR analysis was done at the same day of the transduction. This assured that the actual samples that were kept on ice were not subject to another set of freeze and thaw, which might alter the quality of the intact rAAVs in the samples.

### Transduction of Cells:

[0222] Upon determining the AAV vector titers, equal amounts of vectors were used for transducing cells. The samples that were kept on ice were added to the Huh7 cells that were seeded into 24-well plates one day before the experiment. Multiplicities of infection (MOIs) ranging from 2K to 50K were used for transduction assays. Each sample was tested in duplicate or triplicate biological replicates. The media of the cells were replaced to fresh the next day. After 48-72 hours following transduction of cells, the samples were analyzed for transgene expression. For samples tested for FIX, ELISA was done directly using the undiluted media from the cells to calculate the amount of FIX secreted from the Huh7 cells, and converted to percent of control (transduction by Spark200). For the samples with Renilla luciferase transgene, the cells were lysed in passive lysis buffer provided with the Renilla luciferase assay kit. Each biological sample was split into 4 wells in the 96-well assay plate. The luciferase activities (amount of luminescence) in the lysates were calculated using a luminometer; in certain experiments, the amount of luminescence was converted to percent of the relevant control (Spark200 or Spark100).

### Example 2

[0223] Peptide Insertions into Spark200 (SEQ ID NO:1)

[0224] Several AAV LKO3 capsid (also referred to as AAV-Spark200, Spark200 and Spk200) clones with different point mutations and peptide insertions (including lipid modifying or NLS like peptides), were generated, as shown in Table 1. The peptides were inserted between amino acid positions 32-33, 34-35, 36-37, 138-139 or 139-140 on Spark200.

TABLE 1A
Spark200 and Lysine (K) → Arginine
(R) Mutant Capsids (SEQ ID NOs: 1-10)

| Spark200 | | Sequence |
|---|---|---|
| Number | Spark200 Name | Number |
| 1 | Spark200 | SEQ ID NO: 1 |
| 2 | Spark200-K137R | SEQ ID NO: 2 |
| 3 | Spark200-K528R | SEQ ID NO: 3 |
| 4 | Spark200-K533R | SEQ ID NO: 4 |
| 5 | Spark200-K545R | SEQ ID NO: 5 |
| 6 | Spark200-K528R + K533R | SEQ ID NO: 6 |
| 7 | Spark200-K137R + K528R | SEQ ID NO: 7 |
| 8 | Spark200-K137R + K533R | SEQ ID NO: 8 |
| 9 | Spark200-K137R + K545R | SEQ ID NO: 9 |
| 10 | Spark200-K137R + K528R + K533R | SEQ ID NO: 10 |

TABLE 1B
Spark200 with Peptide Insertions (SEQ ID NOs: 11-26, 42-46)

| Spark200 | | Sequence |
|---|---|---|
| Number | Spark200 Name | Number |
| 11 | Spark200_35_cmycNLS | SEQ ID NO: 11 |
| 12 | Spark200_35_PAARRVRLD | SEQ ID NO: 12 |
| 13 | Spark200_35_M9short_LR-alt | SEQ ID NO: 13 |
| 14 | Spark200_33_M9short_LR-alt | SEQ ID NO: 14 |
| 15 | Spark200_37_M9short_LR-alt | SEQ ID NO: 15 |
| 34 | Spark200_35_M9short_LK-alt1 | SEQ ID NO: 16 |
| 35 | Spark200_35_M9short_LK-alt2 | SEQ ID NO: 17 |
| 36 | Spark200_139_cmycNLS | SEQ ID NO: 18 |
| 37 | Spark200_140_cmycNLS | SEQ ID NO: 19 |
| 38 | Spark200_35_and_140_cmycNLS | SEQ ID NO: 20 |
| 39 | Spark200_140_PAARRVRLD | SEQ ID NO: 21 |
| 40 | Spark200_35_and 140_PAARRVRLD | SEQ ID NO: 22 |
| 41 | Spark200_140_M9short_LK-alt2 | SEQ ID NO: 23 |
| 42 | Spark200_35_cmycNLS_140_M9short_LK-alt2 | SEQ ID NO: 24 |
| 43 | Spark200_35_M9short_LK-alt2-and 140-cmycNLS | SEQ ID NO: 25 |
| 59 | Spark200-140hnRNP_D_NLS | SEQ ID NO: 26 |
| 60 | Spark200-140hnRNP_M_NLS | SEQ ID NO: 42 |
| 61 | Spark200-B1B_140_ptHRP_NLS | SEQ ID NO: 43 |
| 62 | Spark200-B1B_140_class2_NLS | SEQ ID NO: 44 |
| 63 | Spark200-B1B_140_class3_NLS | SEQ ID NO: 45 |
| 64* | Spark200-B1_K137R-140_cmycNLS | SEQ ID NO: 46 |

*Spark200 Number 64 (SEQ ID NO: 46) has a point mutation and a peptide insertion

[0225] For AAV capsid peptide insertions, the amino acid residue number used refers to the first residue of the insertion. Thus, for example, “139” means that the peptide is inserted immediately after amino acid residue 138 of the original capsid protein and, “140” means that the peptide is inserted immediately after amino acid residue 139 of the original capsid protein.

TABLE 1C
Spark200 Capsid Serine and Threonine
Mutants (SEQ ID NOs: 27-32)

| Spark200 | | Sequence |
|---|---|---|
| Number | Spark200 Name | Number |
| 44 | Spark200-T492V | SEQ ID NO: 27 |
| 45 | Spark200-S663V | SEQ ID NO: 28 |
| 46 | Spark200-T492V-S663V | SEQ ID NO: 29 |
| 47 | Spark200-K137R-T492V | SEQ ID NO: 30 |
| 48 | Spark200-K137R-S663V | SEQ ID NO: 31 |
| 49 | Spark200-K137R-T492V-S663V | SEQ ID NO: 32 |

TABLE 1D
Spark200 Capsids with Mutated (L/P)PXY
and/or RXXL Motifs (SEQ ID NOs: 33-41)

| Spark200 | | Sequence |
|---|---|---|
| Number | Spark200 Name | Number |
| 50 | Spark200-Y50A | SEQ ID NO: 33 |
| 51 | Spark200-Y50F | SEQ ID NO: 34 |
| 52 | Spark200-Y50E | SEQ ID NO: 35 |
| 53 | Spark200-Y252A | SEQ ID NO: 36 |
| 54 | Spark200-Y252F | SEQ ID NO: 37 |
| 55 | Spark200-L171A | SEQ ID NO: 38 |
| 56 | Spark200-L479A | SEQ ID NO: 39 |
| 57 | Spark200-L517A | SEQ ID NO: 40 |
| 58 | Spark200-N691A | SEQ ID NO: 41 |

TABLE 1E
Spark200 Capsids with Cell Penetrating
Peptide Inserts (SEQ ID NOs: 47-55)

| | | | | Peptide |
|---|---|---|---|---|
| | | Spark200 | | Insertion |
| Spark 200 | | Sequence | | Sequence |
| Number | Spark200 Name | Number | Sequence of Peptide Insertion | Number |
| 65 | Spark200- | SEQ ID | GLFDIIKKIAESF | SEQ ID |
| | 35_GLFDIIKKIAESF | NO: 47 | | NO: 133 |
| | (aurein 1.2) | | | |
| 66 | Spark200- | SEQ ID | FFLIPKG | SEQ ID |
| | 35_FFLIPKG | NO: 48 | | NO: 134 |
| 67 | Spark200- | SEQ ID | GWTLNSAGYLLGKINLKALAALAKKIL | SEQ ID |
| | 35_transportan | NO: 49 | | NO: 135 |
| 68 | Spark200- | SEQ ID | GRKKRRQRRRPPQ | SEQ ID |
| | 35_TAT-H | NO: 50 | | NO: 136 |
| 69 | Spark200- | SEQ ID | KKAAAVLLPVLLAAP | SEQ ID |
| | 35_KKAAAVLLPVLLAAP | NO: 51 | | NO: 137 |
| 70 | Spark200- | SEQ ID | RQIKIWFQNRRLKWKKGG | SEQ ID |
| | 35_penetratin_MLmut | NO: 52 | | NO: 138 |
| 71 | Spark200- | SEQ ID | RRRRRRRRRRRRRRRR | SEQ ID |
| | 35_R16 | NO: 53 | | NO: 139 |
| 72 | Spark200- | SEQ ID | KKKKKKKKKKKKKKKK | SEQ ID |
| | 35_K16 | NO: 54 | | NO: 140 |
| 73 | Spark200- | SEQ ID | RRRRRRRRRRRRRRRRLRVRLASHLRKLR | SEQ ID |
| | 35_R16_ApoE | NO: 55 | KRLLRDA | NO: 141 |

[0226] The AAV vectors were produced using a small-scale production system in HEK293 cells in 6-well dishes, as described in the materials and methods section (Example 1). The titers of the AAV vectors that are produced in this small scale were calculated using qPCR. Upon calculating vector titer, vectors were used at equal MOIs to transduce cells growing in 24-well plates. For most of the studies, Huh7 cells were used. However, HepG2 and HEK293 cells were also used to evaluate the transduction properties of novel capsids in these cell types.

[0227] Renilla luciferase was the transgene used in most of the AAV vector productions. For the studies using the AAV vectors with this transgene, luciferase activity in the transduced cells was measured using a luminometer. AAV vectors were used at varying MOIs, from 2K to 5K, for luciferase activity. For some of the studies, Factor IX (FIX) was used as a transgene and the FIX levels secreted into the media were determined by ELISA. The MOIs used for the FIX-containing AAV vectors ranged from 5K to 50K. Only the results of the cells in the same plate were used as a comparison, to minimize the effect of plate to plate variability. Each AAV vector was evaluated in duplicate or triplicate biological copies. For studies with Renilla luciferase, each of the biological replicates was transferred to 96-well plate as a quadruplicate technical repeat after lysing with the lysis buffer. For ELISA of FIX containing samples, each biological replicate was analyzed in duplicate technical repeat in the plate. These technical and biological repeats decreased internal variability of the results.

[0228] More than 50 Spark200 variants were evaluated, including peptide insertions and point mutations. Most of the peptide insertions either decreased production of AAV vector or did not substantially increase the AAV vector transduction effectively in vitro. The presence of methionine in the peptide sequence typically decreases AAV vector production and, consistent with this, methionine strongly decreased AAV vector production. As some of the peptides contain methionine in their sequences, the methionine residues were modified to leucine (e.g., M9 (variants shown in Table 2) and penetratin peptide (Table 1E)) or alanine (class3 NLS, Kosugi et al., 2009, J. Biol. Chem., 284:478-485). The amino acid sequences of representative nonlimiting inserted nuclear localization peptides are shown in Table 2.

TABLE 2
Peptides Inserted into Spark200 (LK03) Capsid (SEQ ID NOs: 84-92)

| Peptide Name | Peptide Sequence | Sequence Number |
|---|---|---|
| M9 like NLS-1 | FGNYNNQSSNFGPLRGGNFGGRSSGPY | SEQ ID NO: 84 |
| M9 like NLS-2 | FGNYNNQSSNFGPLKGGNFGGRSSGPY | SEQ ID NO: 85 |
| cmycNLS | PAAKRVKLD | SEQ ID NO: 86 |
| cmyc like NLS | PAARRVRLD | SEQ ID NO: 87 |
| hnRNP_D_NLS | YGDYSNQQSGYGKVSRRGGHQNSYKPY | SEQ ID NO: 88 |
| hnRNP_M_NLS | GEGERPAQNEKRKEKNIKRGGNRFEPY | SEQ ID NO: 89 |
| ptHRP_NLS | RYLTQETNKVETYKEQPLKTPGKKKKGKP | SEQ ID NO: 90 |
| class2_NLS | RAAKRPRTT | SEQ ID NO: 91 |
| class3_NLS | AAAKRSWSAAF | SEQ ID NO: 92 |

[0229] Point mutations changing possible ubiquitin ligase binding sites ((L/P)PXY and RXXL motifs) mostly resulted in a decrease of AAV vector production. The list of Spark200 variants with these modifications is shown in Table 1D. Among those that did not affect AAV vector production, only the L517A (Spark200-L517A; SEQ ID NO:40) mutant showed significant increase in cell transduction; yielding 2- to 3-fold higher transduction as compared to wild type Spark200 (FIGS. 1A-C).

[0230] The studies with peptide insertions showed that the most effective AAV vectors in terms of cell transduction had 2 different insertions at the beginning of VP2 region (FIGS. 1A-C). These insertions were a classical cmycNLS (PAAKRVKLD, SEQ ID NO:86) and a modified version of a class 3 NLS (AAAKRSWSAAF, SEQ ID NO:92) inserted between amino acid position 139 and amino acid position 140. This region is at the beginning of VP2 and is just before the start of the BR2 region of AAV capsid, which acts as an essential NLS for viral transduction.

[0231] These insertions increased the AAV vector transduction by two-fold in different studies using Renilla luciferase constructs in Huh7 cells (FIG. 1A). These findings were repeated in the HEK293 cell line, as well, using Renilla luciferase (FIG. 1B).

[0232] Good performing AAV vectors using a FIX transgene that transduced Huh7 cells were also produced. The amount of FIX levels secreted to the media was higher than the wild type Spark200, confirming better transduction of these AAV vectors (FIG. 1C).

[0233] Additionally, results with the Spark200 construct having the hnRNP_D_NLS insertion are shown in FIG. 1C. This insertion is different from the others in terms of direct binding to karyopherin beta without a need for an importin alpha. While cmycNLS and class3-NLS cannot bind to importin beta and need another carrier, namely importin alpha, to facilitate the binding, hnRNP_D-NLS can bind to importin beta directly. Although hnRNP_D-NLS did not detectably increase Spark200 transduction, the production yield and transduction rate were similar to those of wild type Spark200, unlike most of the similar insertions, (M9_NLS, ptHRP_NLS, hnRNP_MNLS) that can bind to importin beta directly. The presence of certain transport receptors/importins in other cell types may result in these constructs being effective in the context of in vivo transduction.

[0234] Most of the lysine, threonine and serine point mutations did not change AAV vector production, but did not detectably increase AAV vector transduction significantly in vitro.

Peptide Insertions into Spark100 (SEO ID NO:59)
Insertions after BR1 and Before BR2
The effects of NLS peptide insertions into Spark100 (also referred to as Spk100) were also studied. Single (1×) or multiple tandem repeats of the peptides (2× or 3×) were inserted into regions of the Spark100 capsid sequence such that VP1 and VP2 capsid proteins, but not VP3, contain the insertions (Table 3 lists the NLS peptide-modified Spark100 clones, as well as several Spark100 clones with point mutations). Table 4 presents the sequences of Spark100 peptide inserts.

TABLE 3
Spark100 Clones

| | Spark100 | Sequence |
|---|---|---|
| Spark100 Name | Number | Number |
| Spark100 | Spark100_X01 | SEQ ID NO: 59 |
| Spark100_K137R | Spark100_X02 | SEQ ID NO: 60 |
| Spk100_L519A | Spark100_X03 | SEQ ID NO: 61 |
| Spk100-140-cmycNLS | Spark100_X04 | SEQ ID NO: 62 |
| Spk100-140-hnRNP_D_NLS | Spark100_X05 | SEQ ID NO: 63 |
| Spk100-140-class3NLS | Spark100_X06 | SEQ ID NO: 64 |
| Spk100-140-SV40 NLS | Spark100_X07 | SEQ ID NO: 65 |
| Spk100-140-2XcmycNLS | Spark100_X08 | SEQ ID NO: 66 |
| Spk100-140-2xclass3NLS | Spark100_X09 | SEQ ID NO: 67 |
| Spk100-140-2X-SV40 NLS | Spark100_X10 | SEQ ID NO: 68 |
| Spk100-140-1xclass3NLS- | Spark100_X11 | SEQ ID NO: 69 |
| 1X cmycNLS | | |
| Spk100-140-1XcmycNLS- | Spark100_X12 | SEQ ID NO: 70 |
| 1Xclass3NLS | | |
| Spk100-140-3XSV40 NLS | Spark100_X13 | SEQ ID NO: 71 |
| Spk100-140-3XcmycNLS | Spark100_X14 | SEQ ID NO: 72 |
| Spk100-140-3xclass3NLS | Spark100_X15 | SEQ ID NO: 73 |
| Spk100-140-2XcmycNLS- | Spark100_X16 | SEQ ID NO: 74 |
| 1Xclass3NLS | | |
| Spk100-140-2xclass3NLS- | Spark100_X17 | SEQ ID NO: 75 |
| 1X cmycNLS | | |
| Spk100-140-1X hnRNP_D_NLS - | Spark100_X18 | SEQ ID NO: 76 |
| 1Xclass3NLS-1X cmycNLS | | |
| Spk100-L519A-140-cmycNLS | Spark100_X19 | SEQ ID NO: 77 |
| Spk100-163-cmycNLS | Spark100_X20 | SEQ ID NO: 78 |
| Spk100-163-2XcmycNLS | Spark100_X21 | SEQ ID NO: 79 |
| Spk100-163-SV40 NLS | Spark100_X22 | SEQ ID NO: 80 |
| Spk100-163-2X-SV40 NLS | Spark100_X23 | SEQ ID NO: 81 |
| Spk100-163-class3NLS | Spark100_X24 | SEQ ID NO: 82 |
| Spk100-163-2xclass3NLS | Spark100_X25 | SEQ ID NO: 83 |

TABLE 4
Peptides Inserted into Spark100 Capsid
(SEQ ID NOs: 86, 93-97, 92, 98, 99, 88 and 100-104)

| | | Sequence |
|---|---|---|
| Peptide Name | Peptide Sequence | Number |
| cmycNLS | PAAKRVKLD | SEQ ID NO: 86 |
| 2X cmycNLS | PAAKRVKLDEDPAAKRVKLD | SEQ ID NO: 93 |
| 3X cmycNLS | PAAKRVKLDEDPAAKRVKLDEDPAAKRVKLD | SEQ ID NO: 94 |
| SV40 NLS | PKKKRKV | SEQ ID NO: 95 |
| 2X-SV40 NLS | PKKKRKVEDPKKKRKV | SEQ ID NO: 96 |
| 3X-SV40 NLS | PKKKRKVEDPKKKRKVEDPKKKRKV | SEQ ID NO: 97 |
| Class3 NLS | AAAKRSWSAAF | SEQ ID NO: 92 |
| 2X Class3 NLS | AAAKRSWSAAFEDAAAKRSWSAAF | SEQ ID NO: 98 |
| 3X Class3 NLS | AAAKRSWSAAFEDAAAKASWSAAFEDAAAKRSWSAAF | SEQ ID NO: 99 |
| hnRNP-D-NLS | YGDYSNQQSGYGKVSRRGGHQNSYKPY | SEQ ID NO: 88 |
| 1xclass3_NLS-1XcmycNLS | AAAKRSWSAAFEDPAAKRVKLD | SEQ ID NO: 100 |
| 1XcmycNLS-1x class3_NLS | PAAKRVKLDEDAAAKRSWSAAF | SEQ ID NO: 101 |
| 2XcmycNLS-1Xclass3_NLS | PAAKRVKLDEDPAAKRVKLDEDAAAKRSWSAAF | SEQ ID NO: 102 |
| 2xclass3_NLS-1XcmyxNLS | AAAKRSWSAAFEDAAAKRSWSAAFEDPAAKRVKLD | SEQ ID NO: 103 |
| 1X_hnRNP_D_NLS- | YGDYSNQQSGYGKVSRRGGHQNSYKPYEDAAAKRSWS | SEQ ID NO: 104 |
| 1Xclass3NLS-1X_cmycNLS | AAFEDPAAKRVKLD | |

[0235] AAV vectors with the variant Spark100 capsids were produced in small scale in 6-well plates, as described in Example 1. Renilla luciferase was the transgene for these AAV vectors. The AAV vectors were evaluated for transduction of Huh7 cells, and luciferase activity in the cells was determined 48 or 72 hours after AAV vector transduction. In addition to the cmycNLS and class3 NLS that increased the Spark200 transduction, SV40 NLS was also evaluated for Spark100.

[0236] In vitro studies showed up to a 3-fold increase in the cell transduction by 1×NLS insert-containing Spark100 clones (FIG. 3). The AAV vector production yields for these AAV vectors were slightly less than for the wild type Spark100, but at comparable levels (Table 5).

[0237] The studies with modified Spark200 showed that one of the most effective modifications in terms of transduction was the Spark200-L517A mutant, having a mutated RXXL motif. In contrast to the Spark200 results, the analogous mutation in Spark100 (L519A; RXXL mutant) did not measurably increase transduction compared to wild type Spark100 particles (FIG. 3).

TABLE 5
Yields of Spark100 with amino acid point mutations and
1X NLS insertions in small scale AAV vector production

| Spark100 name | % of Wild Type |
|---|---|
| Spark100 | 100 |
| Spark100_K137R | 85-109 |
| Spk100_L517A | 30-36 |
| Spk100-140-cmycNLS | 56-70 |
| Spk100-140-hnRNP_D_NLS | 77-94 |
| Spk100-140-class3NLS | 47-77 |
| Spk100-140-SV40 NLS | 30-47 |
| Spk100-L519A-140-cmycNLS | 54-66 |

[0238] Tandem 2× and 3× insertions of peptides into the Spark100 VP2 region, before BR2, were also evaluated; the peptides are shown in Table 4. AAV vector yield using the above-described small-scale production methods with the Renilla luciferase transgene was reduced (Tables 6 and 7). The largest reduction in AAV vector yield for 2× tandem repeats was observed for Spk100-140-2×class3NLS (also referred to as SparkX09) and Spk100-140-2×SV40 NLS (also referred to as SparkX10). Almost all of the vectors with capsids with the 2× tandem repeat insertions of the same or different NLSs showed 2-fold or greater transduction of Huh7 cells, as compared to wild type Spark100, as determined by luciferase activity (FIGS. 4 and 5). The most effective transductions were observed for vectors with capsids with 2× or 3× class 3 NLS or 2× or 3×SV40 NLSs, which had a 70-90% decrease in AAV vector yield.

TABLE 6
Yields of Spark100 2X NLS insertions
in small scale AAV vector production

| Spark100 name | % of Wild Type |
|---|---|
| Spark100 | 100 |
| Spk100-140-2XcmycNLS | 50-67 |
| Spk100-140-2xclass3NLS | 6-10 |
| Spk100-140-2X-SV40 NLS | 13-25 |
| Spk100-140-1xclass3NLS-1XcmycNLS | 38-46 |
| Spk100-140-1XcmycNLS-1Xclass3NLS | 76-91 |

TABLE 7
Yields of Spark100 3X NLS insertions
in small scale AAV vector production

| Spark100 name | % of Wild Type |
|---|---|
| Spark100 | 100 |
| Spk100-140-3XSV40 NLS | 8-11.8 |
| Spk100-140-3XcmycNLS | 37-55 |
| Spk100-140-3xclass3NLS | 4-7.5 |
| Spk100-140-2XcmcyNLS-1Xclass3NLS | 22-25.3 |
| Spk100-140-2xclass3NLS-1XcmcyNLS | 6-8.3 |
| Spk100-140-1XhnRNP_D_NLS- | 5.8-7 |
| 1Xclass3NLS-1XcmycNLS | |

### Insertions Between BR2 and BR3

[0239] The data show that insertions into the region between BR2 and BR3 can increase transduction without significantly decreasing AAV vector yield (FIG. 7 and Table 8). Renilla luciferase was the transgene for this study.

TABLE 8
Yields of Spark100 1X and Spark100 2X NLS insertions between
BR2 and BR3 in small scale AAV vector production

| Spark100 name | % of wild type |
|---|---|
| Spark100 | 100 |
| Spk100-163-cmycNLS | 84-88 |
| Spk100-163-2XcmycNLS | 31-45 |
| Spk100-163-SV40 NLS | 73-108 |
| Spk100-163-SV40 NLS | 65-73 |
| Spk100-163-class3NLS | 67-123 |
| Spk100-163-2Xclass3NLS | 5-6 |

### Example 3

[0240] Initial in vivo (C57BL/6 mice) studies were performed with an AAV vector comprising an AAV2 capsid with a cmycNLS (PAAKRVKLD; SEQ ID NO:86) inserted between amino acid residues 34-35. The transgene was FIX and FIX levels (ng/mL of plasma) were detected by ELISA. The data show that rAAV particles with cmycNLS (PAAKRVKLD; SEQ ID NO:86) inserted between amino acid residues 34-35 of the AAV2 capsid yielded higher transduction (based on ELISA-detected levels of FIX transgene product) than did rAAV particles having the wild type AAV2 capsid without the NLS insertion (FIG. 8).

[0241] Based upon the initial data from in vitro studies, the following clones were also evaluated in vivo:

### Spark100-X07 (Spk100-140-1×SV40 NLS)

[0242] Spark100-X09 (Spk100-140-2× class3 NLS)

### Spark100-X10 (Spk100-140-2×SV40 NLS)

[0243] rAAV vectors carrying an acid alpha-glucosidase (GAA) transgene were prepared, and the yields for 5 roller bottle (small scale) production were as follows:

Spark100: 6.82×E12 vg/mL (1.7 ml)
Spark100-X07 (Spk100-140-1×SV40 NLS): 6.2×E12 vg/mL (1.45 ml)
Spark100-X09 (Spk100-140-2× class3 NLS): 6.02×E10 vg/mL (0.8 ml)
Spark100-X10(Spk100-140-2×SV40 NLS): 1.21×E13 vg/mL (1.5 ml)

[0244] C57BL/6 mice were injected with a dose of either 1.2×E10 vg/mouse or 3×E9 vg/mouse and plasma GAA enzyme activity was determined by a standard GAA activity assay three weeks post administration. Administration of the rAAV vectors with the modified capsids resulted in measurable plasma GAA activity in vivo, with levels of enzyme activity lower than achieved with rAAV having wild type Spark100 capsid (FIG. 10).

[0245] In a further study, the following were evaluated and in vivo:

Spark100 (Spk100 wild type)

### Spark100-X04 (Spark100-140-cmycNLS)

### Spark100-X05 (Spark100-140-hnRNP D NLS)

[0246] Spark100-X06 (Spark100-140-class3 NLS)

### Spark100-X08 (Spark100-140-2×cmycNLS)

[0247] C57BL/6 mice were injected at a dose of 1.2E10 vg/animal. The modified AAV vectors could still produce GAA enzyme that was detected (based on a standard GAA activity assay) in the plasma one week post administration. The amount of GAA production was comparable to that from rAAV vectors with wild type Spark100 capsids, with Spark100-X04 (Spark100-140-cmycNLS) and Spark100-X06 (Spark100-140-class3 NLS) showing a modest increase over wild type Spark100 (FIG. 11).

### Example 4

TABLE 9
Spark100 with peptide insertions or Lysine
(K) → Arginine (R) substitutions

| | Spark100 | Sequence |
|---|---|---|
| Spark100 Name | Number | Number |
| Spark100-33-cmycNLS | Spark100-X42 | SEQ ID NO: 105 |
| Spark100-35-cmycNLS | Spark100-X43 | SEQ ID NO: 106 |
| Spark100-33-2xcmycNLS | Spark100-X44 | SEQ ID NO: 107 |
| Spark100-35-2xcmycNLS | Spark100-X45 | SEQ ID NO: 108 |
| Spark100-35-3xcmycNLS | Spark100-X46 | SEQ ID NO: 109 |
| Spark100-35-1xClass3NLS | Spark100-X47 | SEQ ID NO: 110 |
| Spark100-35-2xClass3NLS | Spark100-X48 | SEQ ID NO: 111 |
| Spark100-35-3xClass3NLS | Spark100-X49 | SEQ ID NO: 112 |
| Spark100-35-hnRNP_NLS | Spark100-X50 | SEQ ID NO: 113 |
| Spark100-35-1x-SV40 NLS | Spark100-X51 | SEQ ID NO: 114 |
| Spark100_K333R | Spark100-X52 | SEQ ID NO: 115 |
| Spark100_K530R | Spark100-X53 | SEQ ID NO: 116 |
| Spark100_385cmycNLS | Spark100-X54 | SEQ ID NO: 117 |
| Spark100_451cmycNLS | Spark100-X55 | SEQ ID NO: 118 |
| Spark100_457cmycNLS | Spark100-X56 | SEQ ID NO: 119 |
| Spark100_589cmycNLS | Spark100-X57 | SEQ ID NO: 120 |
| Spark100_591cmycNLS | Spark100-X58 | SEQ ID NO: 121 |

[0249] AAV vectors were prepared using either Spark100 or modified Spark100 capsids (see Table 9) and tested in vitro on Huh7 cells. The transgene used for AAV vector production was Renilla luciferase.

[0250] Luciferase activities of the Huh7 cells transduced with rAAV vectors having various NLS insertions in only VP1 of the Spark100 capsid, and carrying the Renilla luciferase transgene are shown in FIGS. 12A and 12B (refer also to Table 9, above). The AAV vectors were produced in small scale, and luciferase activity was determined 48 hours after transduction. The AAV vectors with these NLS insertions yielded similar or less luciferase activity compared to the AAV vectors produced with wild type Spark100 capsid in this study.

[0251] Luciferase activity of the Huh7 cells transduced with capsids Spark100-X52 and Spark100-X53 are shown in FIG. 13 (refer also to Table 9, above). Lysine (K) residues at position 333 or 530 of Spark100 capsid were mutated to arginine (R). These lysine residues are present in VP1, VP2 and VP3 of Spark100. Renilla luciferase was used as the transgene and the AAV vectors were produced in small scale. 48 hours after transduction, the luciferase activity was calculated/determined. The AAV vectors with additional K→R point mutations in the capsid yield similar luciferase activity compared to the AAV vectors produced with wild type Spark100 capsid in this study.

[0252] Luciferase activity of the Huh7 cells transduced with NLS inserts in the VP3 domain of Spark100 capsid are shown in FIG. 14 (refer also to Table 9, above). Renilla luciferase was used as the transgene and the AAV vectors were produced in small scale. Luciferase activity was determined 48 hours after transduction. The AAV vectors with capsids having NLS insertions at amino acid positions 450-451 (Spark100_451cmycNLS) and 456-457 (Spark100_457cmycNLS) yielded higher luciferase activity than the vectors produced with Spark100 capsid.

### Example 5

[0253] As disclosed herein, an increase in transduction upon peptide insertions into either Spark100, Spark200 or AAV2 capsids has been observed in both in vitro and in vivo studies. The NLS peptides in these studies that were most effective were cmycNLS, SV40 NLS and Class3 type NLS.

### Example 6

AMINO ACID SEQUENCES of SPARK200 (Spk200) and
SPARK200 (Spk200) VARIANTS

LK03-X01:
Wild type Spk200 (SEQ ID NO: 1)
MAADGYLPDWLEDNLSEGIREWWALQPGAPKPKANQQHQDNARGLVLPGYKYLGPGNGLDKGEP
VNAADAAALEHDKAYDQQLKAGDNPYLKYNHADAEFQERLKEDTSFGGNLGRAVFQAKKRLLEP
LGLVEEAAKTAPGKKRPVDQSPQEPDSSSGVGKSGKQPARKRLNFGQTGDSESVPDPQPLGEPP
AAPTSLGSNTMASGGGAPMADNNEGADGVGNSSGNWHCDSQWLGDRVITTSTRTWALPTYNNHL
YKQISSQSGASNDNHYFGYSTPWGYFDFNRFHCHFSPRDWQRLINNNWGFRPKKLSFKLFNIQV
KEVTQNDGTTTIANNLTSTVQVFTDSEYQLPYVLGSAHQGCLPPFPADVFMVPQYGYLTLNNGS
QAVGRSSFYCLEYFPSQMLRTGNNFQFSYTFEDVPFHSSYAHSQSLDRLMNPLIDQYLYYLNRT
QGTTSGTTNQSRLLFSQAGPQSMSLQARNWLPGPCYRQQRLSKTANDNNNSNFPWTAASKYHLN
GRDSLVNPGPAMASHKDDEEKFFPMHGNLIFGKEGTTASNAELDNVMITDEEEIRTTNPVATEQ
YGTVANNLQSSNTAPTTRTVNDQGALPGMVWQDRDVYLQGPIWAKIPHTDGHFHPSPLMGGFGL
KHPPPQIMIKNTPVPANPPTTFSPAKFASFITQYSTGQVSVEIEWELQKENSKRWNPEIQYTSN
YNKSVNVDFTVDTNGVYSEPRPIGTRYLTRPL
LK03-X02:
pLK03PK-K137R (SEQ ID NO: 2)
MAADGYLPDWLEDNLSEGIREWWALQPGAPKPKANQQHQDNARGLVLPGYKYLGPGNGLDKGEP
VNAADAAALEHDKAYDQQLKAGDNPYLKYNHADAEFQERLKEDTSFGGNLGRAVFQAKKRLLEP
LGLVEEAARTAPGKKRPVDQSPQEPDSSSGVGKSGKQPARKRLNFGQTGDSESVPDPQPLGEPP
AAPTSLGSNTMASGGGAPMADNNEGADGVGNSSGNWHCDSQWLGDRVITTSTRTWALPTYNNHL
YKQISSQSGASNDNHYFGYSTPWGYFDFNRFHCHFSPRDWQRLINNNWGFRPKKLSFKLFNIQV
KEVTQNDGTTTIANNLTSTVQVFTDSEYQLPYVLGSAHQGCLPPFPADVFMVPQYGYLTLNNGS
QAVGRSSFYCLEYFPSQMLRTGNNFQFSYTFEDVPFHSSYAHSQSLDRLMNPLIDQYLYYLNRT
QGTTSGTTNQSRLLFSQAGPQSMSLQARNWLPGPCYRQQRLSKTANDNNNSNFPWTAASKYHLN
GRDSLVNPGPAMASHKDDEEKFFPMHGNLIFGKEGTTASNAELDNVMITDEEEIRTTNPVATEQ
YGTVANNLQSSNTAPTTRTVNDQGALPGMVWQDRDVYLQGPIWAKIPHTDGHFHPSPLMGGFGL
KHPPPQIMIKNTPVPANPPTTFSPAKFASFITQYSTGQVSVEIEWELQKENSKRWNPEIQYTSN
YNKSVNVDFTVDTNGVYSEPRPIGTRYLTRPL
LK03-X03:
pLK03PK-K528R (SEQ ID NO: 3)
MAADGYLPDWLEDNLSEGIREWWALQPGAPKPKANQQHQDNARGLVLPGYKYLGPGNGLDKGEP
VNAADAAALEHDKAYDQQLKAGDNPYLKYNHADAEFQERLKEDTSFGGNLGRAVFQAKKRLLEP
LGLVEEAAKTAPGKKRPVDQSPQEPDSSSGVGKSGKQPARKRLNFGQTGDSESVPDPQPLGEPP
AAPTSLGSNTMASGGGAPMADNNEGADGVGNSSGNWHCDSQWLGDRVITTSTRTWALPTYNNHL
YKQISSQSGASNDNHYFGYSTPWGYFDFNRFHCHFSPRDWQRLINNNWGFRPKKLSFKLFNIQV
KEVTQNDGTTTIANNLTSTVQVFTDSEYQLPYVLGSAHQGCLPPFPADVFMVPQYGYLTLNNGS
QAVGRSSFYCLEYFPSQMLRTGNNFQFSYTFEDVPFHSSYAHSQSLDRLMNPLIDQYLYYLNRT
QGTTSGTTNQSRLLFSQAGPQSMSLQARNWLPGPCYRQQRLSKTANDNNNSNFPWTAASKYHLN
GRDSLVNPGPAMASHRDDEEKFFPMHGNLIFGKEGTTASNAELDNVMITDEEEIRTTNPVATEQ
YGTVANNLQSSNTAPTTRTVNDQGALPGMVWQDRDVYLQGPIWAKIPHTDGHFHPSPLMGGFGL
KHPPPQIMIKNTPVPANPPTTFSPAKFASFITQYSTGQVSVEIEWELQKENSKRWNPEIQYTSN
YNKSVNVDFTVDTNGVYSEPRPIGTRYLTRPL
LK03-X04:
pLK03PK-K533R (SEQ ID NO: 4)
MAADGYLPDWLEDNLSEGIREWWALQPGAPKPKANQQHQDNARGLVLPGYKYLGPGNGLDKGEP
VNAADAAALEHDKAYDQQLKAGDNPYLKYNHADAEFQERLKEDTSFGGNLGRAVFQAKKRLLEP
LGLVEEAAKTAPGKKRPVDQSPQEPDSSSGVGKSGKQPARKRLNFGQTGDSESVPDPQPLGEPP
AAPTSLGSNTMASGGGAPMADNNEGADGVGNSSGNWHCDSQWLGDRVITTSTRTWALPTYNNHL
YKQISSQSGASNDNHYFGYSTPWGYFDFNRFHCHFSPRDWQRLINNNWGFRPKKLSFKLFNIQV
KEVTQNDGTTTIANNLTSTVQVFTDSEYQLPYVLGSAHQGCLPPFPADVFMVPQYGYLTLNNGS
QAVGRSSFYCLEYFPSQMLRTGNNFQFSYTFEDVPFHSSYAHSQSLDRLMNPLIDQYLYYLNRT
QGTTSGTTNQSRLLFSQAGPQSMSLQARNWLPGPCYRQQRLSKTANDNNNSNFPWTAASKYHLN
GRDSLVNPGPAMASHKDDEERFFPMHGNLIFGKEGTTASNAELDNVMITDEEEIRTTNPVATEQ
YGTVANNLQSSNTAPTTRTVNDQGALPGMVWQDRDVYLQGPIWAKIPHTDGHFHPSPLMGGFGL
KHPPPQIMIKNTPVPANPPTTFSPAKFASFITQYSTGQVSVEIEWELQKENSKRWNPEIQYTSN
YNKSVNVDFTVDTNGVYSEPRPIGTRYLTRPL
LK03-X05:
pLK03PK-K545R (SEQ ID NO: 5)
MAADGYLPDWLEDNLSEGIREWWALQPGAPKPKANQQHQDNARGLVLPGYKYLGPGNGLDKGEP
VNAADAAALEHDKAYDQQLKAGDNPYLKYNHADAEFQERLKEDTSFGGNLGRAVFQAKKRLLEP
LGLVEEAAKTAPGKKRPVDQSPQEPDSSSGVGKSGKQPARKRLNFGQTGDSESVPDPQPLGEPP
AAPTSLGSNTMASGGGAPMADNNEGADGVGNSSGNWHCDSQWLGDRVITTSTRTWALPTYNNHL
YKQISSQSGASNDNHYFGYSTPWGYFDFNRFHCHFSPRDWQRLINNNWGFRPKKLSFKLFNIQV
KEVTQNDGTTTIANNLTSTVQVFTDSEYQLPYVLGSAHQGCLPPFPADVFMVPQYGYLTLNNGS
QAVGRSSFYCLEYFPSQMLRTGNNFQFSYTFEDVPFHSSYAHSQSLDRLMNPLIDQYLYYLNRT
QGTTSGTTNQSRLLFSQAGPQSMSLQARNWLPGPCYRQQRLSKTANDNNNSNFPWTAASKYHLN
GRDSLVNPGPAMASHKDDEEKFFPMHGNLIFGREGTTASNAELDNVMITDEEEIRTTNPVATEQ
YGTVANNLQSSNTAPTTRTVNDQGALPGMVWQDRDVYLQGPIWAKIPHTDGHFHPSPLMGGFGL
KHPPPQIMIKNTPVPANPPTTFSPAKFASFITQYSTGQVSVEIEWELQKENSKRWNPEIQYTSN
YNKSVNVDFTVDTNGVYSEPRPIGTRYLTRPL
LK03-X06:
pLK03PK-K528R-K533R (SEQ ID NO: 6)
MAADGYLPDWLEDNLSEGIREWWALQPGAPKPKANQQHQDNARGLVLPGYKYLGPGNGLDKGEP
VNAADAAALEHDKAYDQQLKAGDNPYLKYNHADAEFQERLKEDTSFGGNLGRAVFQAKKRLLEP
LGLVEEAAKTAPGKKRPVDQSPQEPDSSSGVGKSGKQPARKRLNFGQTGDSESVPDPQPLGEPP
AAPTSLGSNTMASGGGAPMADNNEGADGVGNSSGNWHCDSQWLGDRVITTSTRTWALPTYNNHL
YKQISSQSGASNDNHYFGYSTPWGYFDFNRFHCHFSPRDWQRLINNNWGFRPKKLSFKLFNIQV
KEVTQNDGTTTIANNLTSTVQVFTDSEYQLPYVLGSAHQGCLPPFPADVFMVPQYGYLTLNNGS
QAVGRSSFYCLEYFPSQMLRTGNNFQFSYTFEDVPFHSSYAHSQSLDRLMNPLIDQYLYYLNRT
QGTTSGTTNQSRLLFSQAGPQSMSLQARNWLPGPCYRQQRLSKTANDNNNSNFPWTAASKYHLN
GRDSLVNPGPAMASHRDDEERFFPMHGNLIFGKEGTTASNAELDNVMITDEEEIRTTNPVATEQ
YGTVANNLQSSNTAPTTRTVNDQGALPGMVWQDRDVYLQGPIWAKIPHTDGHFHPSPLMGGFGL
KHPPPQIMIKNTPVPANPPTTFSPAKFASFITQYSTGQVSVEIEWELQKENSKRWNPEIQYTSN
YNKSVNVDFTVDTNGVYSEPRPIGTRYLTRPL
LK03-X07:
pLK03PK-K137R-K528R (SEQ ID NO: 7)
MAADGYLPDWLEDNLSEGIREWWALQPGAPKPKANQQHQDNARGLVLPGYKYLGPGNGLDKGEP
VNAADAAALEHDKAYDQQLKAGDNPYLKYNHADAEFQERLKEDTSFGGNLGRAVFQAKKRLLEP
LGLVEEAARTAPGKKRPVDQSPQEPDSSSGVGKSGKQPARKRLNFGQTGDSESVPDPQPLGEPP
AAPTSLGSNTMASGGGAPMADNNEGADGVGNSSGNWHCDSQWLGDRVITTSTRTWALPTYNNHL
YKQISSQSGASNDNHYFGYSTPWGYFDFNRFHCHFSPRDWQRLINNNWGFRPKKLSFKLFNIQV
KEVTQNDGTTTIANNLTSTVQVFTDSEYQLPYVLGSAHQGCLPPFPADVFMVPQYGYLTLNNGS
QAVGRSSFYCLEYFPSQMLRTGNNFQFSYTFEDVPFHSSYAHSQSLDRLMNPLIDQYLYYLNRT
QGTTSGTTNQSRLLFSQAGPQSMSLQARNWLPGPCYRQQRLSKTANDNNNSNFPWTAASKYHLN
GRDSLVNPGPAMASHRDDEEKFFPMHGNLIFGKEGTTASNAELDNVMITDEEEIRTTNPVATEQ
YGTVANNLQSSNTAPTTRTVNDQGALPGMVWQDRDVYLQGPIWAKIPHTDGHFHPSPLMGGFGL
KHPPPQIMIKNTPVPANPPTTFSPAKFASFITQYSTGQVSVEIEWELQKENSKRWNPEIQYTSN
YNKSVNVDFTVDTNGVYSEPRPIGTRYLTRPL
LK03-X08:
pLK03PK-K137R-K533R (SEQ ID NO: 8)
MAADGYLPDWLEDNLSEGIREWWALQPGAPKPKANQQHQDNARGLVLPGYKYLGPGNGLDKGEP
VNAADAAALEHDKAYDQQLKAGDNPYLKYNHADAEFQERLKEDTSFGGNLGRAVFQAKKRLLEP
LGLVEEAARTAPGKKRPVDQSPQEPDSSSGVGKSGKQPARKRLNFGQTGDSESVPDPQPLGEPP
AAPTSLGSNTMASGGGAPMADNNEGADGVGNSSGNWHCDSQWLGDRVITTSTRTWALPTYNNHL
YKQISSQSGASNDNHYFGYSTPWGYFDFNRFHCHFSPRDWQRLINNNWGFRPKKLSFKLFNIQV
KEVTQNDGTTTIANNLTSTVQVFTDSEYQLPYVLGSAHQGCLPPFPADVFMVPQYGYLTLNNGS
QAVGRSSFYCLEYFPSQMLRTGNNFQFSYTFEDVPFHSSYAHSQSLDRLMNPLIDQYLYYLNRT
QGTTSGTTNQSRLLFSQAGPQSMSLQARNWLPGPCYRQQRLSKTANDNNNSNFPWTAASKYHLN
GRDSLVNPGPAMASHKDDEERFFPMHGNLIFGKEGTTASNAELDNVMITDEEEIRTTNPVATEQ
YGTVANNLQSSNTAPTTRTVNDQGALPGMVWQDRDVYLQGPIWAKIPHTDGHFHPSPLMGGFGL
KHPPPQIMIKNTPVPANPPTTFSPAKFASFITQYSTGQVSVEIEWELQKENSKRWNPEIQYTSN
YNKSVNVDFTVDTNGVYSEPRPIGTRYLTRPL
LK03-X09:
pLK03PK-K137R-K545R (SEQ ID NO: 9)
MAADGYLPDWLEDNLSEGIREWWALQPGAPKPKANQQHQDNARGLVLPGYKYLGPGNGLDKGEP
VNAADAAALEHDKAYDQQLKAGDNPYLKYNHADAEFQERLKEDTSFGGNLGRAVFQAKKRLLEP
LGLVEEAARTAPGKKRPVDQSPQEPDSSSGVGKSGKQPARKRLNFGQTGDSESVPDPQPLGEPP
AAPTSLGSNTMASGGGAPMADNNEGADGVGNSSGNWHCDSQWLGDRVITTSTRTWALPTYNNHL
YKQISSQSGASNDNHYFGYSTPWGYFDFNRFHCHFSPRDWQRLINNNWGFRPKKLSFKLFNIQV
KEVTQNDGTTTIANNLTSTVQVFTDSEYQLPYVLGSAHQGCLPPFPADVFMVPQYGYLTLNNGS
QAVGRSSFYCLEYFPSQMLRTGNNFQFSYTFEDVPFHSSYAHSQSLDRLMNPLIDQYLYYLNRT
QGTTSGTTNQSRLLFSQAGPQSMSLQARNWLPGPCYRQQRLSKTANDNNNSNFPWTAASKYHLN
GRDSLVNPGPAMASHKDDEEKFFPMHGNLIFGREGTTASNAELDNVMITDEEEIRTTNPVATEQ
YGTVANNLQSSNTAPTTRTVNDQGALPGMVWQDRDVYLQGPIWAKIPHTDGHFHPSPLMGGFGL
KHPPPQIMIKNTPVPANPPTTFSPAKFASFITQYSTGQVSVEIEWELQKENSKRWNPEIQYTSN
YNKSVNVDFTVDTNGVYSEPRPIGTRYLTRPL
LK03-X10:
pLK03PK-K137R-K528R-K533R (SEQ ID NO: 10)
MAADGYLPDWLEDNLSEGIREWWALQPGAPKPKANQQHQDNARGLVLPGYKYLGPGNGLDKGEP
VNAADAAALEHDKAYDQQLKAGDNPYLKYNHADAEFQERLKEDTSFGGNLGRAVFQAKKRLLEP
LGLVEEAARTAPGKKRPVDQSPQEPDSSSGVGKSGKQPARKRLNFGQTGDSESVPDPQPLGEPP
AAPTSLGSNTMASGGGAPMADNNEGADGVGNSSGNWHCDSQWLGDRVITTSTRTWALPTYNNHL
YKQISSQSGASNDNHYFGYSTPWGYFDFNRFHCHFSPRDWQRLINNNWGFRPKKLSFKLFNIQV
KEVTQNDGTTTIANNLTSTVQVFTDSEYQLPYVLGSAHQGCLPPFPADVFMVPQYGYLTLNNGS
QAVGRSSFYCLEYFPSQMLRTGNNFQFSYTFEDVPFHSSYAHSQSLDRLMNPLIDQYLYYLNRT
QGTTSGTTNQSRLLFSQAGPQSMSLQARNWLPGPCYRQQRLSKTANDNNNSNFPWTAASKYHLN
GRDSLVNPGPAMASHRDDEERFFPMHGNLIFGKEGTTASNAELDNVMITDEEEIRTTNPVATEQ
YGTVANNLQSSNTAPTTRTVNDQGALPGMVWQDRDVYLQGPIWAKIPHTDGHFHPSPLMGGFGL
KHPPPQIMIKNTPVPANPPTTFSPAKFASFITQYSTGQVSVEIEWELQKENSKRWNPEIQYTSN
YNKSVNVDFTVDTNGVYSEPRPIGTRYLTRPL
LK03-X11:
pLK03PK-35-cmycNLS (SEQ ID NO: 11)
MAADGYLPDWLEDNLSEGIREWWALQPGAPKPKAPAAKRVKLDNQQHQDNARGLVLPGYKYLGP
GNGLDKGEPVNAADAAALEHDKAYDQQLKAGDNPYLKYNHADAEFQERLKEDTSFGGNLGRAVF
QAKKRLLEPLGLVEEAAKTAPGKKRPVDQSPQEPDSSSGVGKSGKQPARKRLNFGQTGDSESVP
DPQPLGEPPAAPTSLGSNTMASGGGAPMADNNEGADGVGNSSGNWHCDSQWLGDRVITTSTRTW
ALPTYNNHLYKQISSQSGASNDNHYFGYSTPWGYFDFNRFHCHFSPRDWQRLINNNWGFRPKKL
SFKLFNIQVKEVTQNDGTTTIANNLTSTVQVFTDSEYQLPYVLGSAHQGCLPPFPADVFMVPQY
GYLTLNNGSQAVGRSSFYCLEYFPSQMLRTGNNFQFSYTFEDVPFHSSYAHSQSLDRLMNPLID
QYLYYLNRTQGTTSGTTNQSRLLFSQAGPQSMSLQARNWLPGPCYRQQRLSKTANDNNNSNFPW
TAASKYHLNGRDSLVNPGPAMASHKDDEEKFFPMHGNLIFGKEGTTASNAELDNVMITDEEEIR
TTNPVATEQYGTVANNLQSSNTAPTTRTVNDQGALPGMVWQDRDVYLQGPIWAKIPHTDGHFHP
SPLMGGFGLKHPPPQIMIKNTPVPANPPTTFSPAKFASFITQYSTGQVSVEIEWELQKENSKRW
NPEIQYTSNYNKSVNVDFTVDTNGVYSEPRPIGTRYLTRPL
LK03-X12:
pLK03PK-35-PAARRVRLD (SEQ ID NO: 12)
MAADGYLPDWLEDNLSEGIREWWALQPGAPKPKAPAARRVRLDNQQHQDNARGLVLPGYKYLGP
GNGLDKGEPVNAADAAALEHDKAYDQQLKAGDNPYLKYNHADAEFQERLKEDTSFGGNLGRAVF
QAKKRLLEPLGLVEEAAKTAPGKKRPVDQSPQEPDSSSGVGKSGKQPARKRLNFGQTGDSESVP
DPQPLGEPPAAPTSLGSNTMASGGGAPMADNNEGADGVGNSSGNWHCDSQWLGDRVITTSTRTW
ALPTYNNHLYKQISSQSGASNDNHYFGYSTPWGYFDFNRFHCHFSPRDWQRLINNNWGFRPKKL
SFKLFNIQVKEVTQNDGTTTIANNLTSTVQVFTDSEYQLPYVLGSAHQGCLPPFPADVFMVPQY
GYLTLNNGSQAVGRSSFYCLEYFPSQMLRTGNNFQFSYTFEDVPFHSSYAHSQSLDRLMNPLID
QYLYYLNRTQGTTSGTTNQSRLLFSQAGPQSMSLQARNWLPGPCYRQQRLSKTANDNNNSNFPW
TAASKYHLNGRDSLVNPGPAMASHKDDEEKFFPMHGNLIFGKEGTTASNAELDNVMITDEEEIR
TTNPVATEQYGTVANNLQSSNTAPTTRTVNDQGALPGMVWQDRDVYLQGPIWAKIPHTDGHFHP
SPLMGGFGLKHPPPQIMIKNTPVPANPPTTFSPAKFASFITQYSTGQVSVEIEWELQKENSKRW
NPEIQYTSNYNKSVNVDFTVDTNGVYSEPRPIGTRYLTRPL
LK03-X13:
pLK03PK-35-M9-LR-alternative (SEQ ID NO: 13)
MAADGYLPDWLEDNLSEGIREWWALQPGAPKPKAFGNYNNQSSNFGPLRGGNFGGRSSGPYNQQ
HQDNARGLVLPGYKYLGPGNGLDKGEPVNAADAAALEHDKAYDQQLKAGDNPYLKYNHADAEFQ
ERLKEDTSFGGNLGRAVFQAKKRLLEPLGLVEEAAKTAPGKKRPVDQSPQEPDSSSGVGKSGKQ
PARKRLNFGQTGDSESVPDPQPLGEPPAAPTSLGSNTMASGGGAPMADNNEGADGVGNSSGNWH
CDSQWLGDRVITTSTRTWALPTYNNHLYKQISSQSGASNDNHYFGYSTPWGYFDFNRFHCHFSP
RDWQRLINNNWGFRPKKLSFKLFNIQVKEVTQNDGTTTIANNLTSTVQVFTDSEYQLPYVLGSA
HQGCLPPFPADVFMVPQYGYLTLNNGSQAVGRSSFYCLEYFPSQMLRTGNNFQFSYTFEDVPFH
SSYAHSQSLDRLMNPLIDQYLYYLNRTQGTTSGTTNQSRLLFSQAGPQSMSLQARNWLPGPCYR
QQRLSKTANDNNNSNFPWTAASKYHLNGRDSLVNPGPAMASHKDDEEKFFPMHGNLIFGKEGTT
ASNAELDNVMITDEEEIRTTNPVATEQYGTVANNLQSSNTAPTTRTVNDQGALPGMVWQDRDVY
LQGPIWAKIPHTDGHFHPSPLMGGFGLKHPPPQIMIKNTPVPANPPTTFSPAKFASFITQYSTG
QVSVEIEWELQKENSKRWNPEIQYTSNYNKSVNVDFTVDTNGVYSEPRPIGTRYLTRPL
LK03-X14:
pLK03PK-33-M9-LR-alternative (SEQ ID NO: 14)
MAADGYLPDWLEDNLSEGIREWWALQPGAPKPFGNYNNQSSNFGPLRGGNFGGRSSGPYKANQQ
HQDNARGLVLPGYKYLGPGNGLDKGEPVNAADAAALEHDKAYDQQLKAGDNPYLKYNHADAEFQ
ERLKEDTSFGGNLGRAVFQAKKRLLEPLGLVEEAAKTAPGKKRPVDQSPQEPDSSSGVGKSGKQ
PARKRLNFGQTGDSESVPDPQPLGEPPAAPTSLGSNTMASGGGAPMADNNEGADGVGNSSGNWH
CDSQWLGDRVITTSTRTWALPTYNNHLYKQISSQSGASNDNHYFGYSTPWGYFDFNRFHCHFSP
RDWQRLINNNWGFRPKKLSFKLFNIQVKEVTQNDGTTTIANNLTSTVQVFTDSEYQLPYVLGSA
HQGCLPPFPADVFMVPQYGYLTLNNGSQAVGRSSFYCLEYFPSQMLRTGNNFQFSYTFEDVPFH
SSYAHSQSLDRLMNPLIDQYLYYLNRTQGTTSGTTNQSRLLFSQAGPQSMSLQARNWLPGPCYR
QQRLSKTANDNNNSNFPWTAASKYHLNGRDSLVNPGPAMASHKDDEEKFFPMHGNLIFGKEGTT
ASNAELDNVMITDEEEIRTTNPVATEQYGTVANNLQSSNTAPTTRTVNDQGALPGMVWQDRDVY
LQGPIWAKIPHTDGHFHPSPLMGGFGLKHPPPQIMIKNTPVPANPPTTFSPAKFASFITQYSTG
QVSVEIEWELQKENSKRWNPEIQYTSNYNKSVNVDFTVDTNGVYSEPRPIGTRYLTRPL
LK03-X15:
pLK03PK-37-M9-LR-alternative (SEQ ID NO: 15)
MAADGYLPDWLEDNLSEGIREWWALQPGAPKPKANQFGNYNNQSSNFGPLRGGNFGGRSSGPYQ
HQDNARGLVLPGYKYLGPGNGLDKGEPVNAADAAALEHDKAYDQQLKAGDNPYLKYNHADAEFQ
ERLKEDTSFGGNLGRAVFQAKKRLLEPLGLVEEAAKTAPGKKRPVDQSPQEPDSSSGVGKSGKQ
PARKRLNFGQTGDSESVPDPQPLGEPPAAPTSLGSNTMASGGGAPMADNNEGADGVGNSSGNWH
CDSQWLGDRVITTSTRTWALPTYNNHLYKQISSQSGASNDNHYFGYSTPWGYFDFNRFHCHFSP
RDWQRLINNNWGFRPKKLSFKLFNIQVKEVTQNDGTTTIANNLTSTVQVFTDSEYQLPYVLGSA
HQGCLPPFPADVFMVPQYGYLTLNNGSQAVGRSSFYCLEYFPSQMLRTGNNFQFSYTFEDVPFH
SSYAHSQSLDRLMNPLIDQYLYYLNRTQGTTSGTTNQSRLLFSQAGPQSMSLQARNWLPGPCYR
QQRLSKTANDNNNSNFPWTAASKYHLNGRDSLVNPGPAMASHKDDEEKFFPMHGNLIFGKEGTT
ASNAELDNVMITDEEEIRTTNPVATEQYGTVANNLQSSNTAPTTRTVNDQGALPGMVWQDRDVY
LQGPIWAKIPHTDGHFHPSPLMGGFGLKHPPPQIMIKNTPVPANPPTTFSPAKFASFITQYSTG
QVSVEIEWELQKENSKRWNPEIQYTSNYNKSVNVDFTVDTNGVYSEPRPIGTRYLTRPL
LK03-X34:
pLK03PK-35-M9-LK-alternative 1 (SEQ ID NO: 16)
MAADGYLPDWLEDNLSEGIREWWALQPGAPKPKAFGNYNNQSSNFGPLKGGNFGGRSSGPYNQQ
HQDNARGLVLPGYKYLGPGNGLDKGEPVNAADAAALEHDKAYDQQLKAGDNPYLKYNHADAEFQ
ERLKEDTSFGGNLGRAVFQAKKRLLEPLGLVEEAAKTAPGKKRPVDQSPQEPDSSSGVGKSGKQ
PARKRLNFGQTGDSESVPDPQPLGEPPAAPTSLGSNTMASGGGAPMADNNEGADGVGNSSGNWH
CDSQWLGDRVITTSTRTWALPTYNNHLYKQISSQSGASNDNHYFGYSTPWGYFDFNRFHCHFSP
RDWQRLINNNWGFRPKKLSFKLFNIQVKEVTQNDGTTTIANNLTSTVQVFTDSEYQLPYVLGSA
HQGCLPPFPADVFMVPQYGYLTLNNGSQAVGRSSFYCLEYFPSQMLRTGNNFQFSYTFEDVPFH
SSYAHSQSLDRLMNPLIDQYLYYLNRTQGTTSGTTNQSRLLFSQAGPQSMSLQARNWLPGPCYR
QQRLSKTANDNNNSNFPWTAASKYHLNGRDSLVNPGPAMASHKDDEEKFFPMHGNLIFGKEGTT
ASNAELDNVMITDEEEIRTTNPVATEQYGTVANNLQSSNTAPTTRTVNDQGALPGMVWQDRDVY
LQGPIWAKIPHTDGHFHPSPLMGGFGLKHPPPQIMIKNTPVPANPPTTFSPAKFASFITQYSTG
QVSVEIEWELQKENSKRWNPEIQYTSNYNKSVNVDFTVDTNGVYSEPRPIGTRYLTRPL
LK03-X35:
pLK03PK-35-M9-LK-alternative 2 (SEQ ID NO: 17)
MAADGYLPDWLEDNLSEGIREWWALQPGAPKPKAFGNYNNQSSNFGPLKGGNFGGRSSGPYNQQ
HQDNARGLVLPGYKYLGPGNGLDKGEPVNAADAAALEHDKAYDQQLKAGDNPYLKYNHADAEFQ
ERLKEDTSFGGNLGRAVFQAKKRLLEPLGLVEEAAKTAPGKKRPVDQSPQEPDSSSGVGKSGKQ
PARKRLNFGQTGDSESVPDPQPLGEPPAAPTSLGSNTMASGGGAPMADNNEGADGVGNSSGNWH
CDSQWLGDRVITTSTRTWALPTYNNHLYKQISSQSGASNDNHYFGYSTPWGYFDFNRFHCHFSP
RDWQRLINNNWGFRPKKLSFKLFNIQVKEVTQNDGTTTIANNLTSTVQVFTDSEYQLPYVLGSA
HQGCLPPFPADVFMVPQYGYLTLNNGSQAVGRSSFYCLEYFPSQMLRTGNNFQFSYTFEDVPFH
SSYAHSQSLDRLMNPLIDQYLYYLNRTQGTTSGTTNQSRLLFSQAGPQSMSLQARNWLPGPCYR
QQRLSKTANDNNNSNFPWTAASKYHLNGRDSLVNPGPAMASHKDDEEKFFPMHGNLIFGKEGTT
ASNAELDNVMITDEEEIRTTNPVATEQYGTVANNLQSSNTAPTTRTVNDQGALPGMVWQDRDVY
LQGPIWAKIPHTDGHFHPSPLMGGFGLKHPPPQIMIKNTPVPANPPTTFSPAKFASFITQYSTG
QVSVEIEWELQKENSKRWNPEIQYTSNYNKSVNVDFTVDTNGVYSEPRPIGTRYLTRPL
LK03-X36:
pLK03PK-139-cmycNLS (SEQ ID NO: 18)
MAADGYLPDWLEDNLSEGIREWWALQPGAPKPKANQQHQDNARGLVLPGYKYLGPGNGLDKGEP
VNAADAAALEHDKAYDQQLKAGDNPYLKYNHADAEFQERLKEDTSFGGNLGRAVFQAKKRLLEP
LGLVEEAAKTPAAKRVKLDAPGKKRPVDQSPQEPDSSSGVGKSGKQPARKRLNFGQTGDSESVP
DPQPLGEPPAAPTSLGSNTMASGGGAPMADNNEGADGVGNSSGNWHCDSQWLGDRVITTSTRTW
ALPTYNNHLYKQISSQSGASNDNHYFGYSTPWGYFDFNRFHCHFSPRDWQRLINNNWGFRPKKL
SFKLFNIQVKEVTQNDGTTTIANNLTSTVQVFTDSEYQLPYVLGSAHQGCLPPFPADVFMVPQY
GYLTLNNGSQAVGRSSFYCLEYFPSQMLRTGNNFQFSYTFEDVPFHSSYAHSQSLDRLMNPLID
QYLYYLNRTQGTTSGTTNQSRLLFSQAGPQSMSLQARNWLPGPCYRQQRLSKTANDNNNSNFPW
TAASKYHLNGRDSLVNPGPAMASHKDDEEKFFPMHGNLIFGKEGTTASNAELDNVMITDEEEIR
TTNPVATEQYGTVANNLQSSNTAPTTRTVNDQGALPGMVWQDRDVYLQGPIWAKIPHTDGHFHP
SPLMGGFGLKHPPPQIMIKNTPVPANPPTTFSPAKFASFITQYSTGQVSVEIEWELQKENSKRW
NPEIQYTSNYNKSVNVDFTVDTNGVYSEPRPIGTRYLTRPL
LK03-X37:
pLK03PK-140-cmycNLS (SEQ ID NO: 19)
MAADGYLPDWLEDNLSEGIREWWALQPGAPKPKANQQHQDNARGLVLPGYKYLGPGNGLDKGEP
VNAADAAALEHDKAYDQQLKAGDNPYLKYNHADAEFQERLKEDTSFGGNLGRAVFQAKKRLLEP
LGLVEEAAKTAPAAKRVKLDPGKKRPVDQSPQEPDSSSGVGKSGKQPARKRLNFGQTGDSESVP
DPQPLGEPPAAPTSLGSNTMASGGGAPMADNNEGADGVGNSSGNWHCDSQWLGDRVITTSTRTW
ALPTYNNHLYKQISSQSGASNDNHYFGYSTPWGYFDFNRFHCHFSPRDWQRLINNNWGFRPKKL
SFKLFNIQVKEVTQNDGTTTIANNLTSTVQVFTDSEYQLPYVLGSAHQGCLPPFPADVFMVPQY
GYLTLNNGSQAVGRSSFYCLEYFPSQMLRTGNNFQFSYTFEDVPFHSSYAHSQSLDRLMNPLID
QYLYYLNRTQGTTSGTTNQSRLLFSQAGPQSMSLQARNWLPGPCYRQQRLSKTANDNNNSNFPW
TAASKYHLNGRDSLVNPGPAMASHKDDEEKFFPMHGNLIFGKEGTTASNAELDNVMITDEEEIR
TTNPVATEQYGTVANNLQSSNTAPTTRTVNDQGALPGMVWQDRDVYLQGPIWAKIPHTDGHFHP
SPLMGGFGLKHPPPQIMIKNTPVPANPPTTFSPAKFASFITQYSTGQVSVEIEWELQKENSKRW
NPEIQYTSNYNKSVNVDFTVDTNGVYSEPRPIGTRYLTRPL
LK03-X38:
pLK03PK-35 and 140-cmycNLS (SEQ ID NO: 20)
MAADGYLPDWLEDNLSEGIREWWALQPGAPKPKAPAAKRVKLDNQQHQDNARGLVLPGYKYLGP
GNGLDKGEPVNAADAAALEHDKAYDQQLKAGDNPYLKYNHADAEFQERLKEDTSFGGNLGRAVF
QAKKRLLEPLGLVEEAAKTAPAAKRVKLDPGKKRPVDQSPQEPDSSSGVGKSGKQPARKRLNFG
QTGDSESVPDPQPLGEPPAAPTSLGSNTMASGGGAPMADNNEGADGVGNSSGNWHCDSQWLGDR
VITTSTRTWALPTYNNHLYKQISSQSGASNDNHYFGYSTPWGYFDFNRFHCHFSPRDWQRLINN
NWGFRPKKLSFKLFNIQVKEVTQNDGTTTIANNLTSTVQVFTDSEYQLPYVLGSAHQGCLPPFP
ADVFMVPQYGYLTLNNGSQAVGRSSFYCLEYFPSQMLRTGNNFQFSYTFEDVPFHSSYAHSQSL
DRLMNPLIDQYLYYLNRTQGTTSGTTNQSRLLFSQAGPQSMSLQARNWLPGPCYRQQRLSKTAN
DNNNSNFPWTAASKYHLNGRDSLVNPGPAMASHKDDEEKFFPMHGNLIFGKEGTTASNAELDNV
MITDEEEIRTTNPVATEQYGTVANNLQSSNTAPTTRTVNDQGALPGMVWQDRDVYLQGPIWAKI
PHTDGHFHPSPLMGGFGLKHPPPQIMIKNTPVPANPPTTFSPAKFASFITQYSTGQVSVEIEWE
LQKENSKRWNPEIQYTSNYNKSVNVDFTVDTNGVYSEPRPIGTRYLTRPL
LK03-X39:
pLK03PK-140-PAARRVRLD(SEQ ID NO: 21)
MAADGYLPDWLEDNLSEGIREWWALQPGAPKPKANQQHQDNARGLVLPGYKYLGPGNGLDKGEP
VNAADAAALEHDKAYDQQLKAGDNPYLKYNHADAEFQERLKEDTSFGGNLGRAVFQAKKRLLEP
LGLVEEAAKTAPAARRVRLDPGKKRPVDQSPQEPDSSSGVGKSGKQPARKRLNFGQTGDSESVP
DPQPLGEPPAAPTSLGSNTMASGGGAPMADNNEGADGVGNSSGNWHCDSQWLGDRVITTSTRTW
ALPTYNNHLYKQISSQSGASNDNHYFGYSTPWGYFDFNRFHCHFSPRDWQRLINNNWGFRPKKL
SFKLFNIQVKEVTQNDGTTTIANNLTSTVQVFTDSEYQLPYVLGSAHQGCLPPFPADVFMVPQY
GYLTLNNGSQAVGRSSFYCLEYFPSQMLRTGNNFQFSYTFEDVPFHSSYAHSQSLDRLMNPLID
QYLYYLNRTQGTTSGTTNQSRLLFSQAGPQSMSLQARNWLPGPCYRQQRLSKTANDNNNSNFPW
TAASKYHLNGRDSLVNPGPAMASHKDDEEKFFPMHGNLIFGKEGTTASNAELDNVMITDEEEIR
TTNPVATEQYGTVANNLQSSNTAPTTRTVNDQGALPGMVWQDRDVYLQGPIWAKIPHTDGHFHP
SPLMGGFGLKHPPPQIMIKNTPVPANPPTTFSPAKFASFITQYSTGQVSVEIEWELQKENSKRW
NPEIQYTSNYNKSVNVDFTVDTNGVYSEPRPIGTRYLTRPL
LK03-X40:
pLK03PK-35 and 140-PAARRVRLD(SEQ ID NO :22)
MAADGYLPDWLEDNLSEGIREWWALQPGAPKPKAPAARRVRLDNQQHQDNARGLVLPGYKYLGP
GNGLDKGEPVNAADAAALEHDKAYDQQLKAGDNPYLKYNHADAEFQERLKEDTSFGGNLGRAVF
QAKKRLLEPLGLVEEAAKTAPAARRVRLDPGKKRPVDQSPQEPDSSSGVGKSGKQPARKRLNFG
QTGDSESVPDPQPLGEPPAAPTSLGSNTMASGGGAPMADNNEGADGVGNSSGNWHCDSQWLGDR
VITTSTRTWALPTYNNHLYKQISSQSGASNDNHYFGYSTPWGYFDFNRFHCHFSPRDWQRLINN
NWGFRPKKLSFKLFNIQVKEVTQNDGTTTIANNLTSTVQVFTDSEYQLPYVLGSAHQGCLPPFP
ADVFMVPQYGYLTLNNGSQAVGRSSFYCLEYFPSQMLRTGNNFQFSYTFEDVPFHSSYAHSQSL
DRLMNPLIDQYLYYLNRTQGTTSGTTNQSRLLFSQAGPQSMSLQARNWLPGPCYRQQRLSKTAN
DNNNSNFPWTAASKYHLNGRDSLVNPGPAMASHKDDEEKFFPMHGNLIFGKEGTTASNAELDNV
MITDEEEIRTTNPVATEQYGTVANNLQSSNTAPTTRTVNDQGALPGMVWQDRDVYLQGPIWAKI
PHTDGHFHPSPLMGGFGLKHPPPQIMIKNTPVPANPPTTFSPAKFASFITQYSTGQVSVEIEWE
LQKENSKRWNPEIQYTSNYNKSVNVDFTVDTNGVYSEPRPIGTRYLTRPL
LK03-X41:
pLK03PK-140_M9-LK-alternative 2 (SEQ ID NO :23)
MAADGYLPDWLEDNLSEGIREWWALQPGAPKPKANQQHQDNARGLVLPGYKYLGPGNGLDKGEP
VNAADAAALEHDKAYDQQLKAGDNPYLKYNHADAEFQERLKEDTSFGGNLGRAVFQAKKRLLEP
LGLVEEAAKTAFGNYNNQSSNFGPLKGGNFGGRSSGPYPGKKRPVDQSPQEPDSSSGVGKSGKQ
PARKRLNFGQTGDSESVPDPQPLGEPPAAPTSLGSNTMASGGGAPMADNNEGADGVGNSSGNWH
CDSQWLGDRVITTSTRTWALPTYNNHLYKQISSQSGASNDNHYFGYSTPWGYFDFNRFHCHFSP
RDWQRLINNNWGFRPKKLSFKLFNIQVKEVTQNDGTTTIANNLTSTVQVFTDSEYQLPYVLGSA
HQGCLPPFPADVFMVPQYGYLTLNNGSQAVGRSSFYCLEYFPSQMLRTGNNFQFSYTFEDVPFH
SSYAHSQSLDRLMNPLIDQYLYYLNRTQGTTSGTTNQSRLLFSQAGPQSMSLQARNWLPGPCYR
QQRLSKTANDNNNSNFPWTAASKYHLNGRDSLVNPGPAMASHKDDEEKFFPMHGNLIFGKEGTT
ASNAELDNVMITDEEEIRTTNPVATEQYGTVANNLQSSNTAPTTRTVNDQGALPGMVWQDRDVY
LQGPIWAKIPHTDGHFHPSPLMGGFGLKHPPPQIMIKNTPVPANPPTTFSPAKFASFITQYSTG
QVSVEIEWELQKENSKRWNPEIQYTSNYNKSVNVDFTVDTNGVYSEPRPIGTRYLTRPL
LK03-X42:
pLK03PK-35-cmycNLSand140_M9-LK-alternative 2 (SEQ ID NO: 24)
MAADGYLPDWLEDNLSEGIREWWALQPGAPKPKAPAAKRVKLDNQQHQDNARGLVLPGYKYLGP
GNGLDKGEPVNAADAAALEHDKAYDQQLKAGDNPYLKYNHADAEFQERLKEDTSFGGNLGRAVF
QAKKRLLEPLGLVEEAAKTAFGNYNNQSSNFGPLKGGNFGGRSSGPYPGKKRPVDQSPQEPDSS
SGVGKSGKQPARKRLNFGQTGDSESVPDPQPLGEPPAAPTSLGSNTMASGGGAPMADNNEGADG
VGNSSGNWHCDSQWLGDRVITTSTRTWALPTYNNHLYKQISSQSGASNDNHYFGYSTPWGYFDF
NRFHCHFSPRDWQRLINNNWGFRPKKLSFKLFNIQVKEVTQNDGTTTIANNLTSTVQVFTDSEY
QLPYVLGSAHQGCLPPFPADVFMVPQYGYLTLNNGSQAVGRSSFYCLEYFPSQMLRTGNNFQFS
YTFEDVPFHSSYAHSQSLDRLMNPLIDQYLYYLNRTQGTTSGTTNQSRLLFSQAGPQSMSLQAR
NWLPGPCYRQQRLSKTANDNNNSNFPWTAASKYHLNGRDSLVNPGPAMASHKDDEEKFFPMHGN
LIFGKEGTTASNAELDNVMITDEEEIRTTNPVATEQYGTVANNLQSSNTAPTTRTVNDQGALPG
MVWQDRDVYLQGPIWAKIPHTDGHFHPSPLMGGFGLKHPPPQIMIKNTPVPANPPTTFSPAKFA
SFITQYSTGQVSVEIEWELQKENSKRWNPEIQYTSNYNKSVNVDFTVDTNGVYSEPRPIGTRYL
TRPL
LK03-X43:
pLK03PK-35-M9-LK-alt2_140-cmycNLS (SEQ ID NO: 25)
MAADGYLPDWLEDNLSEGIREWWALQPGAPKPKAFGNYNNQSSNFGPLKGGNFGGRSSGPYNQQ
HQDNARGLVLPGYKYLGPGNGLDKGEPVNAADAAALEHDKAYDQQLKAGDNPYLKYNHADAEFQ
ERLKEDTSFGGNLGRAVFQAKKRLLEPLGLVEEAAKTAPAAKRVKLDPGKKRPVDQSPQEPDSS
SGVGKSGKQPARKRLNFGQTGDSESVPDPQPLGEPPAAPTSLGSNTMASGGGAPMADNNEGADG
VGNSSGNWHCDSQWLGDRVITTSTRTWALPTYNNHLYKQISSQSGASNDNHYFGYSTPWGYFDF
NRFHCHFSPRDWQRLINNNWGFRPKKLSFKLFNIQVKEVTQNDGTTTIANNLTSTVQVFTDSEY
QLPYVLGSAHQGCLPPFPADVFMVPQYGYLTLNNGSQAVGRSSFYCLEYFPSQMLRTGNNFQFS
YTFEDVPFHSSYAHSQSLDRLMNPLIDQYLYYLNRTQGTTSGTTNQSRLLFSQAGPQSMSLQAR
NWLPGPCYRQQRLSKTANDNNNSNFPWTAASKYHLNGRDSLVNPGPAMASHKDDEEKFFPMHGN
LIFGKEGTTASNAELDNVMITDEEEIRTTNPVATEQYGTVANNLQSSNTAPTTRTVNDQGALPG
MVWQDRDVYLQGPIWAKIPHTDGHFHPSPLMGGFGLKHPPPQIMIKNTPVPANPPTTFSPAKFA
SFITQYSTGQVSVEIEWELQKENSKRWNPEIQYTSNYNKSVNVDFTVDTNGVYSEPRPIGTRYL
TRPL
LK03-X59:
LK03-14OhnRNP_D_NLS (SEQ ID NO: 26)
MAADGYLPDWLEDNLSEGIREWWALQPGAPKPKANQQHQDNARGLVLPGYKYLGPGNGLDKGEP
VNAADAAALEHDKAYDQQLKAGDNPYLKYNHADAEFQERLKEDTSFGGNLGRAVFQAKKRLLEP
LGLVEEAAKTAYGDYSNQQSGYGKVSRRGGHQNSYKPYPGKKRPVDQSPQEPDSSSGVGKSGKQ
PARKRLNFGQTGDSESVPDPQPLGEPPAAPTSLGSNTMASGGGAPMADNNEGADGVGNSSGNWH
CDSQWLGDRVITTSTRTWALPTYNNHLYKQISSQSGASNDNHYFGYSTPWGYFDFNRFHCHFSP
RDWQRLINNNWGFRPKKLSFKLFNIQVKEVTQNDGTTTIANNLTSTVQVFTDSEYQLPYVLGSA
HQGCLPPFPADVFMVPQYGYLTLNNGSQAVGRSSFYCLEYFPSQMLRTGNNFQFSYTFEDVPFH
SSYAHSQSLDRLMNPLIDQYLYYLNRTQGTTSGTTNQSRLLFSQAGPQSMSLQARNWLPGPCYR
QQRLSKTANDNNNSNFPWTAASKYHLNGRDSLVNPGPAMASHKDDEEKFFPMHGNLIFGKEGTT
ASNAELDNVMITDEEEIRTTNPVATEQYGTVANNLQSSNTAPTTRTVNDQGALPGMVWQDRDVY
LQGPIWAKIPHTDGHFHPSPLMGGFGLKHPPPQIMIKNTPVPANPPTTFSPAKFASFITQYSTG
QVSVEIEWELQKENSKRWNPEIQYTSNYNKSVNVDFTVDTNGVYSEPRPIGTRYLTRPL
LK03-X44:
pLK03-T492V (SEQ ID NO: 27)
MAADGYLPDWLEDNLSEGIREWWALQPGAPKPKANQQHQDNARGLVLPGYKYLGPGNGLDKGEP
VNAADAAALEHDKAYDQQLKAGDNPYLKYNHADAEFQERLKEDTSFGGNLGRAVFQAKKRLLEP
LGLVEEAAKTAPGKKRPVDQSPQEPDSSSGVGKSGKQPARKRLNFGQTGDSESVPDPQPLGEPP
AAPTSLGSNTMASGGGAPMADNNEGADGVGNSSGNWHCDSQWLGDRVITTSTRTWALPTYNNHL
YKQISSQSGASNDNHYFGYSTPWGYFDFNRFHCHFSPRDWQRLINNNWGFRPKKLSFKLFNIQV
KEVTQNDGTTTIANNLTSTVQVFTDSEYQLPYVLGSAHQGCLPPFPADVFMVPQYGYLTLNNGS
QAVGRSSFYCLEYFPSQMLRTGNNFQFSYTFEDVPFHSSYAHSQSLDRLMNPLIDQYLYYLNRT
QGTTSGTTNQSRLLFSQAGPQSMSLQARNWLPGPCYRQQRLSKVANDNNNSNFPWTAASKYHLN
GRDSLVNPGPAMASHKDDEEKFFPMHGNLIFGKEGTTASNAELDNVMITDEEEIRTTNPVATEQ
YGTVANNLQSSNTAPTTRTVNDQGALPGMVWQDRDVYLQGPIWAKIPHTDGHFHPSPLMGGFGL
KHPPPQIMIKNTPVPANPPTTFSPAKFASFITQYSTGQVSVEIEWELQKENSKRWNPEIQYTSN
YNKSVNVDFTVDTNGVYSEPRPIGTRYLTRPL
LK03-X45:
pLK03-T663V (SEQ ID NO: 28)
MAADGYLPDWLEDNLSEGIREWWALQPGAPKPKANQQHQDNARGLVLPGYKYLGPGNGLDKGEP
VNAADAAALEHDKAYDQQLKAGDNPYLKYNHADAEFQERLKEDTSFGGNLGRAVFQAKKRLLEP
LGLVEEAAKTAPGKKRPVDQSPQEPDSSSGVGKSGKQPARKRLNFGQTGDSESVPDPQPLGEPP
AAPTSLGSNTMASGGGAPMADNNEGADGVGNSSGNWHCDSQWLGDRVITTSTRTWALPTYNNHL
YKQISSQSGASNDNHYFGYSTPWGYFDFNRFHCHFSPRDWQRLINNNWGFRPKKLSFKLFNIQV
KEVTQNDGTTTIANNLTSTVQVFTDSEYQLPYVLGSAHQGCLPPFPADVFMVPQYGYLTLNNGS
QAVGRSSFYCLEYFPSQMLRTGNNFQFSYTFEDVPFHSSYAHSQSLDRLMNPLIDQYLYYLNRT
QGTTSGTTNQSRLLFSQAGPQSMSLQARNWLPGPCYRQQRLSKTANDNNNSNFPWTAASKYHLN
GRDSLVNPGPAMASHKDDEEKFFPMHGNLIFGKEGTTASNAELDNVMITDEEEIRTTNPVATEQ
YGTVANNLQSSNTAPTTRTVNDQGALPGMVWQDRDVYLQGPIWAKIPHTDGHFHPSPLMGGFGL
KHPPPQIMIKNTPVPANPPTTFVPAKFASFITQYSTGQVSVEIEWELQKENSKRWNPEIQYTSN
YNKSVNVDFTVDTNGVYSEPRPIGTRYLTRPL
LK03-X46:
pLK03-T492V-T663V (SEQ ID NO: 29)
MAADGYLPDWLEDNLSEGIREWWALQPGAPKPKANQQHQDNARGLVLPGYKYLGPGNGLDKGEP
VNAADAAALEHDKAYDQQLKAGDNPYLKYNHADAEFQERLKEDTSFGGNLGRAVFQAKKRLLEP
LGLVEEAAKTAPGKKRPVDQSPQEPDSSSGVGKSGKQPARKRLNFGQTGDSESVPDPQPLGEPP
AAPTSLGSNTMASGGGAPMADNNEGADGVGNSSGNWHCDSQWLGDRVITTSTRTWALPTYNNHL
YKQISSQSGASNDNHYFGYSTPWGYFDFNRFHCHFSPRDWQRLINNNWGFRPKKLSFKLFNIQV
KEVTQNDGTTTIANNLTSTVQVFTDSEYQLPYVLGSAHQGCLPPFPADVFMVPQYGYLTLNNGS
QAVGRSSFYCLEYFPSQMLRTGNNFQFSYTFEDVPFHSSYAHSQSLDRLMNPLIDQYLYYLNRT
QGTTSGTTNQSRLLFSQAGPQSMSLQARNWLPGPCYRQQRLSKVANDNNNSNFPWTAASKYHLN
GRDSLVNPGPAMASHKDDEEKFFPMHGNLIFGKEGTTASNAELDNVMITDEEEIRTTNPVATEQ
YGTVANNLQSSNTAPTTRTVNDQGALPGMVWQDRDVYLQGPIWAKIPHTDGHFHPSPLMGGFGL
KHPPPQIMIKNTPVPANPPTTFVPAKFASFITQYSTGQVSVEIEWELQKENSKRWNPEIQYTSN
YNKSVNVDFTVDTNGVYSEPRPIGTRYLTRPL
LK03-X47:
pLK03-K137R-T492V (SEQ ID NO: 30)
MAADGYLPDWLEDNLSEGIREWWALQPGAPKPKANQQHQDNARGLVLPGYKYLGPGNGLDKGEP
VNAADAAALEHDKAYDQQLKAGDNPYLKYNHADAEFQERLKEDTSFGGNLGRAVFQAKKRLLEP
LGLVEEAARTAPGKKRPVDQSPQEPDSSSGVGKSGKQPARKRLNFGQTGDSESVPDPQPLGEPP
AAPTSLGSNTMASGGGAPMADNNEGADGVGNSSGNWHCDSQWLGDRVITTSTRTWALPTYNNHL
YKQISSQSGASNDNHYFGYSTPWGYFDFNRFHCHFSPRDWQRLINNNWGFRPKKLSFKLFNIQV
KEVTQNDGTTTIANNLTSTVQVFTDSEYQLPYVLGSAHQGCLPPFPADVFMVPQYGYLTLNNGS
QAVGRSSFYCLEYFPSQMLRTGNNFQFSYTFEDVPFHSSYAHSQSLDRLMNPLIDQYLYYLNRT
QGTTSGTTNQSRLLFSQAGPQSMSLQARNWLPGPCYRQQRLSKVANDNNNSNFPWTAASKYHLN
GRDSLVNPGPAMASHKDDEEKFFPMHGNLIFGKEGTTASNAELDNVMITDEEEIRTTNPVATEQ
YGTVANNLQSSNTAPTTRTVNDQGALPGMVWQDRDVYLQGPIWAKIPHTDGHFHPSPLMGGFGL
KHPPPQIMIKNTPVPANPPTTFSPAKFASFITQYSTGQVSVEIEWELQKENSKRWNPEIQYTSN
YNKSVNVDFTVDTNGVYSEPRPIGTRYLTRPL
LK03-X48:
pLK03-K137R-T663V (SEQ ID NO: 31)
MAADGYLPDWLEDNLSEGIREWWALQPGAPKPKANQQHQDNARGLVLPGYKYLGPGNGLDKGEP
VNAADAAALEHDKAYDQQLKAGDNPYLKYNHADAEFQERLKEDTSFGGNLGRAVFQAKKRLLEP
LGLVEEAARTAPGKKRPVDQSPQEPDSSSGVGKSGKQPARKRLNFGQTGDSESVPDPQPLGEPP
AAPTSLGSNTMASGGGAPMADNNEGADGVGNSSGNWHCDSQWLGDRVITTSTRTWALPTYNNHL
YKQISSQSGASNDNHYFGYSTPWGYFDFNRFHCHFSPRDWQRLINNNWGFRPKKLSFKLFNIQV
KEVTQNDGTTTIANNLTSTVQVFTDSEYQLPYVLGSAHQGCLPPFPADVFMVPQYGYLTLNNGS
QAVGRSSFYCLEYFPSQMLRTGNNFQFSYTFEDVPFHSSYAHSQSLDRLMNPLIDQYLYYLNRT
QGTTSGTTNQSRLLFSQAGPQSMSLQARNWLPGPCYRQQRLSKTANDNNNSNFPWTAASKYHLN
GRDSLVNPGPAMASHKDDEEKFFPMHGNLIFGKEGTTASNAELDNVMITDEEEIRTTNPVATEQ
YGTVANNLQSSNTAPTTRTVNDQGALPGMVWQDRDVYLQGPIWAKIPHTDGHFHPSPLMGGFGL
KHPPPQIMIKNTPVPANPPTTFVPAKFASFITQYSTGQVSVEIEWELQKENSKRWNPEIQYTSN
YNKSVNVDFTVDTNGVYSEPRPIGTRYLTRPL
LK03-X49
pLK03-K137R-T492V-T663V (SEQ ID NO: 32)
MAADGYLPDWLEDNLSEGIREWWALQPGAPKPKANQQHQDNARGLVLPGYKYLGPGNGLDKGEP
VNAADAAALEHDKAYDQQLKAGDNPYLKYNHADAEFQERLKEDTSFGGNLGRAVFQAKKRLLEP
LGLVEEAARTAPGKKRPVDQSPQEPDSSSGVGKSGKQPARKRLNFGQTGDSESVPDPQPLGEPP
AAPTSLGSNTMASGGGAPMADNNEGADGVGNSSGNWHCDSQWLGDRVITTSTRTWALPTYNNHL
YKQISSQSGASNDNHYFGYSTPWGYFDFNRFHCHFSPRDWQRLINNNWGFRPKKLSFKLFNIQV
KEVTQNDGTTTIANNLTSTVQVFTDSEYQLPYVLGSAHQGCLPPFPADVFMVPQYGYLTLNNGS
QAVGRSSFYCLEYFPSQMLRTGNNFQFSYTFEDVPFHSSYAHSQSLDRLMNPLIDQYLYYLNRT
QGTTSGTTNQSRLLFSQAGPQSMSLQARNWLPGPCYRQQRLSKVANDNNNSNFPWTAASKYHLN
GRDSLVNPGPAMASHKDDEEKFFPMHGNLIFGKEGTTASNAELDNVMITDEEEIRTTNPVATEQ
YGTVANNLQSSNTAPTTRTVNDQGALPGMVWQDRDVYLQGPIWAKIPHTDGHFHPSPLMGGFGL
KHPPPQIMIKNTPVPANPPTTFVPAKFASFITQYSTGQVSVEIEWELQKENSKRWNPEIQYTSN
YNKSVNVDFTVDTNGVYSEPRPIGTRYLTRPL
LK03-X50:
pLK03-Y50A (SEQ ID NO: 33)
MAADGYLPDWLEDNLSEGIREWWALQPGAPKPKANQQHQDNARGLVLPGAKYLGPGNGLDKGEP
VNAADAAALEHDKAYDQQLKAGDNPYLKYNHADAEFQERLKEDTSFGGNLGRAVFQAKKRLLEP
LGLVEEAAKTAPGKKRPVDQSPQEPDSSSGVGKSGKQPARKRLNFGQTGDSESVPDPQPLGEPP
AAPTSLGSNTMASGGGAPMADNNEGADGVGNSSGNWHCDSQWLGDRVITTSTRTWALPTYNNHL
YKQISSQSGASNDNHYFGYSTPWGYFDFNRFHCHFSPRDWQRLINNNWGFRPKKLSFKLFNIQV
KEVTQNDGTTTIANNLTSTVQVFTDSEYQLPYVLGSAHQGCLPPFPADVFMVPQYGYLTLNNGS
QAVGRSSFYCLEYFPSQMLRTGNNFQFSYTFEDVPFHSSYAHSQSLDRLMNPLIDQYLYYLNRT
QGTTSGTTNQSRLLFSQAGPQSMSLQARNWLPGPCYRQQRLSKTANDNNNSNFPWTAASKYHLN
GRDSLVNPGPAMASHKDDEEKFFPMHGNLIFGKEGTTASNAELDNVMITDEEEIRTTNPVATEQ
YGTVANNLQSSNTAPTTRTVNDQGALPGMVWQDRDVYLQGPIWAKIPHTDGHFHPSPLMGGFGL
KHPPPQIMIKNTPVPANPPTTFSPAKFASFITQYSTGQVSVEIEWELQKENSKRWNPEIQYTSN
YNKSVNVDFTVDTNGVYSEPRPIGTRYLTRPL
LK03-X51:
pLK03-Y50F(SEQ ID NO: 34)
MAADGYLPDWLEDNLSEGIREWWALQPGAPKPKANQQHQDNARGLVLPGFKYLGPGNGLDKGEP
VNAADAAALEHDKAYDQQLKAGDNPYLKYNHADAEFQERLKEDTSFGGNLGRAVFQAKKRLLEP
LGLVEEAAKTAPGKKRPVDQSPQEPDSSSGVGKSGKQPARKRLNFGQTGDSESVPDPQPLGEPP
AAPTSLGSNTMASGGGAPMADNNEGADGVGNSSGNWHCDSQWLGDRVITTSTRTWALPTYNNHL
YKQISSQSGASNDNHYFGYSTPWGYFDFNRFHCHFSPRDWQRLINNNWGFRPKKLSFKLFNIQV
KEVTQNDGTTTIANNLTSTVQVFTDSEYQLPYVLGSAHQGCLPPFPADVFMVPQYGYLTLNNGS
QAVGRSSFYCLEYFPSQMLRTGNNFQFSYTFEDVPFHSSYAHSQSLDRLMNPLIDQYLYYLNRT
QGTTSGTTNQSRLLFSQAGPQSMSLQARNWLPGPCYRQQRLSKTANDNNNSNFPWTAASKYHLN
GRDSLVNPGPAMASHKDDEEKFFPMHGNLIFGKEGTTASNAELDNVMITDEEEIRTTNPVATEQ
YGTVANNLQSSNTAPTTRTVNDQGALPGMVWQDRDVYLQGPIWAKIPHTDGHFHPSPLMGGFGL
KHPPPQIMIKNTPVPANPPTTFSPAKFASFITQYSTGQVSVEIEWELQKENSKRWNPEIQYTSN
YNKSVNVDFTVDTNGVYSEPRPIGTRYLTRPL
LK03-X52:
pLK03-Y50E(SEQ ID NO: 35)
MAADGYLPDWLEDNLSEGIREWWALQPGAPKPKANQQHQDNARGLVLPGEKYLGPGNGLDKGEP
VNAADAAALEHDKAYDQQLKAGDNPYLKYNHADAEFQERLKEDTSFGGNLGRAVFQAKKRLLEP
LGLVEEAAKTAPGKKRPVDQSPQEPDSSSGVGKSGKQPARKRLNFGQTGDSESVPDPQPLGEPP
AAPTSLGSNTMASGGGAPMADNNEGADGVGNSSGNWHCDSQWLGDRVITTSTRTWALPTYNNHL
YKQISSQSGASNDNHYFGYSTPWGYFDFNRFHCHFSPRDWQRLINNNWGFRPKKLSFKLFNIQV
KEVTQNDGTTTIANNLTSTVQVFTDSEYQLPYVLGSAHQGCLPPFPADVFMVPQYGYLTLNNGS
QAVGRSSFYCLEYFPSQMLRTGNNFQFSYTFEDVPFHSSYAHSQSLDRLMNPLIDQYLYYLNRT
QGTTSGTTNQSRLLFSQAGPQSMSLQARNWLPGPCYRQQRLSKTANDNNNSNFPWTAASKYHLN
GRDSLVNPGPAMASHKDDEEKFFPMHGNLIFGKEGTTASNAELDNVMITDEEEIRTTNPVATEQ
YGTVANNLQSSNTAPTTRTVNDQGALPGMVWQDRDVYLQGPIWAKIPHTDGHFHPSPLMGGFGL
KHPPPQIMIKNTPVPANPPTTFSPAKFASFITQYSTGQVSVEIEWELQKENSKRWNPEIQYTSN
YNKSVNVDFTVDTNGVYSEPRPIGTRYLTRPL
LK03-X53:
pLK03-Y252A (SEQ ID NO: 36)
MAADGYLPDWLEDNLSEGIREWWALQPGAPKPKANQQHQDNARGLVLPGYKYLGPGNGLDKGEP
VNAADAAALEHDKAYDQQLKAGDNPYLKYNHADAEFQERLKEDTSFGGNLGRAVFQAKKRLLEP
LGLVEEAAKTAPGKKRPVDQSPQEPDSSSGVGKSGKQPARKRLNFGQTGDSESVPDPQPLGEPP
AAPTSLGSNTMASGGGAPMADNNEGADGVGNSSGNWHCDSQWLGDRVITTSTRTWALPTANNHL
YKQISSQSGASNDNHYFGYSTPWGYFDFNRFHCHFSPRDWQRLINNNWGFRPKKLSFKLFNIQV
KEVTQNDGTTTIANNLTSTVQVFTDSEYQLPYVLGSAHQGCLPPFPADVFMVPQYGYLTLNNGS
QAVGRSSFYCLEYFPSQMLRTGNNFQFSYTFEDVPFHSSYAHSQSLDRLMNPLIDQYLYYLNRT
QGTTSGTTNQSRLLFSQAGPQSMSLQARNWLPGPCYRQQRLSKTANDNNNSNFPWTAASKYHLN
GRDSLVNPGPAMASHKDDEEKFFPMHGNLIFGKEGTTASNAELDNVMITDEEEIRTTNPVATEQ
YGTVANNLQSSNTAPTTRTVNDQGALPGMVWQDRDVYLQGPIWAKIPHTDGHFHPSPLMGGFGL
KHPPPQIMIKNTPVPANPPTTFSPAKFASFITQYSTGQVSVEIEWELQKENSKRWNPEIQYTSN
YNKSVNVDFTVDTNGVYSEPRPIGTRYLTRPL
LK03-X54:
pLK03-Y252F (SEQ ID NO: 37)
MAADGYLPDWLEDNLSEGIREWWALQPGAPKPKANQQHQDNARGLVLPGYKYLGPGNGLDKGEP
VNAADAAALEHDKAYDQQLKAGDNPYLKYNHADAEFQERLKEDTSFGGNLGRAVFQAKKRLLEP
LGLVEEAAKTAPGKKRPVDQSPQEPDSSSGVGKSGKQPARKRLNFGQTGDSESVPDPQPLGEPP
AAPTSLGSNTMASGGGAPMADNNEGADGVGNSSGNWHCDSQWLGDRVITTSTRTWALPTFNNHL
YKQISSQSGASNDNHYFGYSTPWGYFDFNRFHCHFSPRDWQRLINNNWGFRPKKLSFKLFNIQV
KEVTQNDGTTTIANNLTSTVQVFTDSEYQLPYVLGSAHQGCLPPFPADVFMVPQYGYLTLNNGS
QAVGRSSFYCLEYFPSQMLRTGNNFQFSYTFEDVPFHSSYAHSQSLDRLMNPLIDQYLYYLNRT
QGTTSGTTNQSRLLFSQAGPQSMSLQARNWLPGPCYRQQRLSKTANDNNNSNFPWTAASKYHLN
GRDSLVNPGPAMASHKDDEEKFFPMHGNLIFGKEGTTASNAELDNVMITDEEEIRTTNPVATEQ
YGTVANNLQSSNTAPTTRTVNDQGALPGMVWQDRDVYLQGPIWAKIPHTDGHFHPSPLMGGFGL
KHPPPQIMIKNTPVPANPPTTFSPAKFASFITQYSTGQVSVEIEWELQKENSKRWNPEIQYTSN
YNKSVNVDFTVDTNGVYSEPRPIGTRYLTRPL
LK03-X55:
pLK03-L171A (SEQ ID NO: 38)
MAADGYLPDWLEDNLSEGIREWWALQPGAPKPKANQQHQDNARGLVLPGYKYLGPGNGLDKGEP
VNAADAAALEHDKAYDQQLKAGDNPYLKYNHADAEFQERLKEDTSFGGNLGRAVFQAKKRLLEP
LGLVEEAAKTAPGKKRPVDQSPQEPDSSSGVGKSGKQPARKRANFGQTGDSESVPDPQPLGEPP
AAPTSLGSNTMASGGGAPMADNNEGADGVGNSSGNWHCDSQWLGDRVITTSTRTWALPTYNNHL
YKQISSQSGASNDNHYFGYSTPWGYFDFNRFHCHFSPRDWQRLINNNWGFRPKKLSFKLFNIQV
KEVTQNDGTTTIANNLTSTVQVFTDSEYQLPYVLGSAHQGCLPPFPADVFMVPQYGYLTLNNGS
QAVGRSSFYCLEYFPSQMLRTGNNFQFSYTFEDVPFHSSYAHSQSLDRLMNPLIDQYLYYLNRT
QGTTSGTTNQSRLLFSQAGPQSMSLQARNWLPGPCYRQQRLSKTANDNNNSNFPWTAASKYHLN
GRDSLVNPGPAMASHKDDEEKFFPMHGNLIFGKEGTTASNAELDNVMITDEEEIRTTNPVATEQ
YGTVANNLQSSNTAPTTRTVNDQGALPGMVWQDRDVYLQGPIWAKIPHTDGHFHPSPLMGGFGL
KHPPPQIMIKNTPVPANPPTTFSPAKFASFITQYSTGQVSVEIEWELQKENSKRWNPEIQYTSN
YNKSVNVDFTVDTNGVYSEPRPIGTRYLTRPL
LK03-X56:
pLK03-L479A (SEQ ID NO: 39)
MAADGYLPDWLEDNLSEGIREWWALQPGAPKPKANQQHQDNARGLVLPGYKYLGPGNGLDKGEP
VNAADAAALEHDKAYDQQLKAGDNPYLKYNHADAEFQERLKEDTSFGGNLGRAVFQAKKRLLEP
LGLVEEAAKTAPGKKRPVDQSPQEPDSSSGVGKSGKQPARKRLNFGQTGDSESVPDPQPLGEPP
AAPTSLGSNTMASGGGAPMADNNEGADGVGNSSGNWHCDSQWLGDRVITTSTRTWALPTYNNHL
YKQISSQSGASNDNHYFGYSTPWGYFDFNRFHCHFSPRDWQRLINNNWGFRPKKLSFKLFNIQV
KEVTQNDGTTTIANNLTSTVQVFTDSEYQLPYVLGSAHQGCLPPFPADVFMVPQYGYLTLNNGS
QAVGRSSFYCLEYFPSQMLRTGNNFQFSYTFEDVPFHSSYAHSQSLDRLMNPLIDQYLYYLNRT
QGTTSGTTNQSRLLFSQAGPQSMSLQARNWAPGPCYRQQRLSKTANDNNNSNFPWTAASKYHLN
GRDSLVNPGPAMASHKDDEEKFFPMHGNLIFGKEGTTASNAELDNVMITDEEEIRTTNPVATEQ
YGTVANNLQSSNTAPTTRTVNDQGALPGMVWQDRDVYLQGPIWAKIPHTDGHFHPSPLMGGFGL
KHPPPQIMIKNTPVPANPPTTFSPAKFASFITQYSTGQVSVEIEWELQKENSKRWNPEIQYTSN
YNKSVNVDFTVDTNGVYSEPRPIGTRYLTRPL
LK03-X57:
pLK03-L517A (SEQ ID NO: 40)
MAADGYLPDWLEDNLSEGIREWWALQPGAPKPKANQQHQDNARGLVLPGYKYLGPGNGLDKGEP
VNAADAAALEHDKAYDQQLKAGDNPYLKYNHADAEFQERLKEDTSFGGNLGRAVFQAKKRLLEP
LGLVEEAAKTAPGKKRPVDQSPQEPDSSSGVGKSGKQPARKRLNFGQTGDSESVPDPQPLGEPP
AAPTSLGSNTMASGGGAPMADNNEGADGVGNSSGNWHCDSQWLGDRVITTSTRTWALPTYNNHL
YKQISSQSGASNDNHYFGYSTPWGYFDFNRFHCHFSPRDWQRLINNNWGFRPKKLSFKLFNIQV
KEVTQNDGTTTIANNLTSTVQVFTDSEYQLPYVLGSAHQGCLPPFPADVFMVPQYGYLTLNNGS
QAVGRSSFYCLEYFPSQMLRTGNNFQFSYTFEDVPFHSSYAHSQSLDRLMNPLIDQYLYYLNRT
QGTTSGTTNQSRLLFSQAGPQSMSLQARNWLPGPCYRQQRLSKTANDNNNSNFPWTAASKYHLN
GRDSAVNPGPAMASHKDDEEKFFPMHGNLIFGKEGTTASNAELDNVMITDEEEIRTTNPVATEQ
YGTVANNLQSSNTAPTTRTVNDQGALPGMVWQDRDVYLQGPIWAKIPHTDGHFHPSPLMGGFGL
KHPPPQIMIKNTPVPANPPTTFSPAKFASFITQYSTGQVSVEIEWELQKENSKRWNPEIQYTSN
YNKSVNVDFTVDTNGVYSEPRPIGTRYLTRPL
LK03-X58:
pLK03-N691A (SEQ ID NO: 41)
MAADGYLPDWLEDNLSEGIREWWALQPGAPKPKANQQHQDNARGLVLPGYKYLGPGNGLDKGEP
VNAADAAALEHDKAYDQQLKAGDNPYLKYNHADAEFQERLKEDTSFGGNLGRAVFQAKKRLLEP
LGLVEEAAKTAPGKKRPVDQSPQEPDSSSGVGKSGKQPARKRLNFGQTGDSESVPDPQPLGEPP
AAPTSLGSNTMASGGGAPMADNNEGADGVGNSSGNWHCDSQWLGDRVITTSTRTWALPTYNNHL
YKQISSQSGASNDNHYFGYSTPWGYFDFNRFHCHFSPRDWQRLINNNWGFRPKKLSFKLFNIQV
KEVTQNDGTTTIANNLTSTVQVFTDSEYQLPYVLGSAHQGCLPPFPADVFMVPQYGYLTLNNGS
QAVGRSSFYCLEYFPSQMLRTGNNFQFSYTFEDVPFHSSYAHSQSLDRLMNPLIDQYLYYLNRT
QGTTSGTTNQSRLLFSQAGPQSMSLQARNWLPGPCYRQQRLSKTANDNNNSNFPWTAASKYHLN
GRDSLVNPGPAMASHKDDEEKFFPMHGNLIFGKEGTTASNAELDNVMITDEEEIRTTNPVATEQ
YGTVANNLQSSNTAPTTRTVNDQGALPGMVWQDRDVYLQGPIWAKIPHTDGHFHPSPLMGGFGL
KHPPPQIMIKNTPVPANPPTTFSPAKFASFITQYSTGQVSVEIEWELQKEASKRWNPEIQYTSN
YNKSVNVDFTVDTNGVYSEPRPIGTRYLTRPL
LK03-X60:
LK03-140hnRNP_M_NLS (SEQ ID NO: 42)
MAADGYLPDWLEDNLSEGIREWWALQPGAPKPKANQQHQDNARGLVLPGYKYLGPGNGLDKGEP
VNAADAAALEHDKAYDQQLKAGDNPYLKYNHADAEFQERLKEDTSFGGNLGRAVFQAKKRLLEP
LGLVEEAAKTAGEGERPAQNEKRKEKNIKRGGNRFEPYPGKKRPVDQSPQEPDSSSGVGKSGKQ
PARKRLNFGQTGDSESVPDPQPLGEPPAAPTSLGSNTMASGGGAPMADNNEGADGVGNSSGNWH
CDSQWLGDRVITTSTRTWALPTYNNHLYKQISSQSGASNDNHYFGYSTPWGYFDFNRFHCHFSP
RDWQRLINNNWGFRPKKLSFKLFNIQVKEVTQNDGTTTIANNLTSTVQVFTDSEYQLPYVLGSA
HQGCLPPFPADVFMVPQYGYLTLNNGSQAVGRSSFYCLEYFPSQMLRTGNNFQFSYTFEDVPFH
SSYAHSQSLDRLMNPLIDQYLYYLNRTQGTTSGTTNQSRLLFSQAGPQSMSLQARNWLPGPCYR
QQRLSKTANDNNNSNFPWTAASKYHLNGRDSLVNPGPAMASHKDDEEKFFPMHGNLIFGKEGTT
ASNAELDNVMITDEEEIRTTNPVATEQYGTVANNLQSSNTAPTTRTVNDQGALPGMVWQDRDVY
LQGPIWAKIPHTDGHFHPSPLMGGFGLKHPPPQIMIKNTPVPANPPTTFSPAKFASFITQYSTG
QVSVEIEWELQKENSKRWNPEIQYTSNYNKSVNVDFTVDTNGVYSEPRPIGTRYLTRPL
LK03-X61:
LK03-140-ptHRP_NLS (SEQ ID NO: 43)
MAADGYLPDWLEDNLSEGIREWWALQPGAPKPKANQQHQDNARGLVLPGYKYLGPGNGLDKGEP
VNAADAAALEHDKAYDQQLKAGDNPYLKYNHADAEFQERLKEDTSFGGNLGRAVFQAKKRLLEP
LGLVEEAAKTARYLTQETNKVETYKEQPLKTPGKKKKGKPPGKKRPVDQSPQEPDSSSGVGKSG
KQPARKRLNFGQTGDSESVPDPQPLGEPPAAPTSLGSNTMASGGGAPMADNNEGADGVGNSSGN
WHCDSQWLGDRVITTSTRTWALPTYNNHLYKQISSQSGASNDNHYFGYSTPWGYFDFNRFHCHF
SPRDWQRLINNNWGFRPKKLSFKLFNIQVKEVTQNDGTTTIANNLTSTVQVFTDSEYQLPYVLG
SAHQGCLPPFPADVFMVPQYGYLTLNNGSQAVGRSSFYCLEYFPSQMLRTGNNFQFSYTFEDVP
FHSSYAHSQSLDRLMNPLIDQYLYYLNRTQGTTSGTTNQSRLLFSQAGPQSMSLQARNWLPGPC
YRQQRLSKTANDNNNSNFPWTAASKYHLNGRDSLVNPGPAMASHKDDEEKFFPMHGNLIFGKEG
TTASNAELDNVMITDEEEIRTTNPVATEQYGTVANNLQSSNTAPTTRTVNDQGALPGMVWQDRD
VYLQGPIWAKIPHTDGHFHPSPLMGGFGLKHPPPQIMIKNTPVPANPPTTFSPAKFASFITQYS
TGQVSVEIEWELQKENSKRWNPEIQYTSNYNKSVNVDFTVDTNGVYSEPRPIGTRYLTRPL
LK03-X62
LK03-140-class2_NLS (SEQ ID NO: 44)
MAADGYLPDWLEDNLSEGIREWWALQPGAPKPKANQQHQDNARGLVLPGYKYLGPGNGLDKGEP
VNAADAAALEHDKAYDQQLKAGDNPYLKYNHADAEFQERLKEDTSFGGNLGRAVFQAKKRLLEP
LGLVEEAAKTARAAKRPRTTPGKKRPVDQSPQEPDSSSGVGKSGKQPARKRLNFGQTGDSESVP
DPQPLGEPPAAPTSLGSNTMASGGGAPMADNNEGADGVGNSSGNWHCDSQWLGDRVITTSTRTW
ALPTYNNHLYKQISSQSGASNDNHYFGYSTPWGYFDFNRFHCHFSPRDWQRLINNNWGFRPKKL
SFKLFNIQVKEVTQNDGTTTIANNLTSTVQVFTDSEYQLPYVLGSAHQGCLPPFPADVFMVPQY
GYLTLNNGSQAVGRSSFYCLEYFPSQMLRTGNNFQFSYTFEDVPFHSSYAHSQSLDRLMNPLID
QYLYYLNRTQGTTSGTTNQSRLLFSQAGPQSMSLQARNWLPGPCYRQQRLSKTANDNNNSNFPW
TAASKYHLNGRDSLVNPGPAMASHKDDEEKFFPMHGNLIFGKEGTTASNAELDNVMITDEEEIR
TTNPVATEQYGTVANNLQSSNTAPTTRTVNDQGALPGMVWQDRDVYLQGPIWAKIPHTDGHFHP
SPLMGGFGLKHPPPQIMIKNTPVPANPPTTFSPAKFASFITQYSTGQVSVEIEWELQKENSKRW
NPEIQYTSNYNKSVNVDFTVDTNGVYSEPRPIGTRYLTRPL
LK03-X63:
LK03-140-class3_NLS (SEQ ID NO: 45)
MAADGYLPDWLEDNLSEGIREWWALQPGAPKPKANQQHQDNARGLVLPGYKYLGPGNGLDKGEP
VNAADAAALEHDKAYDQQLKAGDNPYLKYNHADAEFQERLKEDTSFGGNLGRAVFQAKKRLLEP
LGLVEEAAKTAAAAKRSWSAAFPGKKRPVDQSPQEPDSSSGVGKSGKQPARKRLNFGQTGDSES
VPDPQPLGEPPAAPTSLGSNTMASGGGAPMADNNEGADGVGNSSGNWHCDSQWLGDRVITTSTR
TWALPTYNNHLYKQISSQSGASNDNHYFGYSTPWGYFDFNRFHCHFSPRDWQRLINNNWGFRPK
KLSFKLFNIQVKEVTQNDGTTTIANNLTSTVQVFTDSEYQLPYVLGSAHQGCLPPFPADVFMVP
QYGYLTLNNGSQAVGRSSFYCLEYFPSQMLRTGNNFQFSYTFEDVPFHSSYAHSQSLDRLMNPL
IDQYLYYLNRTQGTTSGTTNQSRLLFSQAGPQSMSLQARNWLPGPCYRQQRLSKTANDNNNSNF
PWTAASKYHLNGRDSLVNPGPAMASHKDDEEKFFPMHGNLIFGKEGTTASNAELDNVMITDEEE
IRTTNPVATEQYGTVANNLQSSNTAPTTRTVNDQGALPGMVWQDRDVYLQGPIWAKIPHTDGHF
HPSPLMGGFGLKHPPPQIMIKNTPVPANPPTTFSPAKFASFITQYSTGQVSVEIEWELQKENSK
RWNPEIQYTSNYNKSVNVDFTVDTNGVYSEPRPIGTRYLTRPL
LK03-X64:
LK03-K137R-140-cmycNLS (SEQ ID NO: 46)
MAADGYLPDWLEDNLSEGIREWWALQPGAPKPKANQQHQDNARGLVLPGYKYLGPGNGLDKGEP
VNAADAAALEHDKAYDQQLKAGDNPYLKYNHADAEFQERLKEDTSFGGNLGRAVFQAKKRLLEP
LGLVEEAARTAPAAKRVKLDPGKKRPVDQSPQEPDSSSGVGKSGKQPARKRLNFGQTGDSESVP
DPQPLGEPPAAPTSLGSNTMASGGGAPMADNNEGADGVGNSSGNWHCDSQWLGDRVITTSTRTW
ALPTYNNHLYKQISSQSGASNDNHYFGYSTPWGYFDFNRFHCHFSPRDWQRLINNNWGFRPKKL
SFKLFNIQVKEVTQNDGTTTIANNLTSTVQVFTDSEYQLPYVLGSAHQGCLPPFPADVFMVPQY
GYLTLNNGSQAVGRSSFYCLEYFPSQMLRTGNNFQFSYTFEDVPFHSSYAHSQSLDRLMNPLID
QYLYYLNRTQGTTSGTTNQSRLLFSQAGPQSMSLQARNWLPGPCYRQQRLSKTANDNNNSNFPW
TAASKYHLNGRDSLVNPGPAMASHKDDEEKFFPMHGNLIFGKEGTTASNAELDNVMITDEEEIR
TTNPVATEQYGTVANNLQSSNTAPTTRTVNDQGALPGMVWQDRDVYLQGPIWAKIPHTDGHFHP
SPLMGGFGLKHPPPQIMIKNTPVPANPPTTFSPAKFASFITQYSTGQVSVEIEWELQKENSKRW
NPEIQYTSNYNKSVNVDFTVDTNGVYSEPRPIGTRYLTRPL
LK03-X65:
pLK03-35_GLFDIIKKIAESF (SEQ ID NO: 47)
MAADGYLPDWLEDNLSEGIREWWALQPGAPKPKAGLFDIIKKIAESFNQQHQDNARGLVLPGYK
YLGPGNGLDKGEPVNAADAAALEHDKAYDQQLKAGDNPYLKYNHADAEFQERLKEDTSFGGNLG
RAVFQAKKRLLEPLGLVEEAAKTAPGKKRPVDQSPQEPDSSSGVGKSGKQPARKRLNFGQTGDS
ESVPDPQPLGEPPAAPTSLGSNTMASGGGAPMADNNEGADGVGNSSGNWHCDSQWLGDRVIITS
TRTWALPTYNNHLYKQISSQSGASNDNHYFGYSTPWGYFDFNRFHCHFSPRDWQRLINNNWGFR
PKKLSFKLFNIQVKEVTQNDGTTTIANNLTSTVQVFTDSEYQLPYVLGSAHQGCLPPFPADVFM
VPQYGYLTLNNGSQAVGRSSFYCLEYFPSQMLRTGNNFQFSYTFEDVPFHSSYAHSQSLDRLMN
PLIDQYLYYLNRTQGTTSGTTNQSRLLFSQAGPQSMSLQARNWLPGPCYRQQRLSKTANDNNNS
NFPWTAASKYHLNGRDSLVNPGPAMASHKDDEEKFFPMHGNLIFGKEGTTASNAELDNVMIIDE
EEIRTTNPVATEQYGTVANNLQSSNTAPTTRTVNDQGALPGMVWQDRDVYLQGPIWAKIPHTDG
HFHPSPLMGGFGLKHPPPQIMIKNTPVPANPPTTFSPAKFASFITQYSTGQVSVEIEWELQKEN
SKRWNPEIQYTSNYNKSVNVDFTVDTNGVYSEPRPIGTRYLTRPL
LK03-X66:
pLK03-35_FFLIPKG (SEQ ID NO: 48)
MAADGYLPDWLEDNLSEGIREWWALQPGAPKPKAFFLIPKGNQQHQDNARGLVLPGYKYLGPGN
GLDKGEPVNAADAAALEHDKAYDQQLKAGDNPYLKYNHADAEFQERLKEDTSFGGNLGRAVFQA
KKRLLEPLGLVEEAAKTAPGKKRPVDQSPQEPDSSSGVGKSGKQPARKRLNFGQTGDSESVPDP
QPLGEPPAAPTSLGSNTMASGGGAPMADNNEGADGVGNSSGNWHCDSQWLGDRVITTSTRTWAL
PTYNNHLYKQISSQSGASNDNHYFGYSTPWGYFDFNRFHCHFSPRDWQRLINNNWGFRPKKLSF
KLFNIQVKEVTQNDGTTTIANNLTSTVQVFTDSEYQLPYVLGSAHQGCLPPFPADVFMVPQYGY
LTLNNGSQAVGRSSFYCLEYFPSQMLRTGNNFQFSYTFEDVPFHSSYAHSQSLDRLMNPLIDQY
LYYLNRTQGTTSGTTNQSRLLFSQAGPQSMSLQARNWLPGPCYRQQRLSKTANDNNNSNFPWTA
ASKYHLNGRDSLVNPGPAMASHKDDEEKFFPMHGNLIFGKEGTTASNAELDNVMITDEEEIRTT
NPVATEQYGTVANNLQSSNTAPTTRTVNDQGALPGMVWQDRDVYLQGPIWAKIPHTDGHFHPSP
LMGGFGLKHPPPQIMIKNTPVPANPPTTFSPAKFASFITQYSTGQVSVEIEWELQKENSKRWNP
EIQYTSNYNKSVNVDFTVDTNGVYSEPRPIGTRYLTRPL
LK03-X67:
pLK03-35_transportan (SEQ ID NO: 49)
MAADGYLPDWLEDNLSEGIREWWALQPGAPKPKAGWTLNSAGYLLGKINLKALAALAKKILNQQ
HQDNARGLVLPGYKYLGPGNGLDKGEPVNAADAAALEHDKAYDQQLKAGDNPYLKYNHADAEFQ
ERLKEDTSFGGNLGRAVFQAKKRLLEPLGLVEEAAKTAPGKKRPVDQSPQEPDSSSGVGKSGKQ
PARKRLNFGQTGDSESVPDPQPLGEPPAAPTSLGSNTMASGGGAPMADNNEGADGVGNSSGNWH
CDSQWLGDRVITTSTRTWALPTYNNHLYKQISSQSGASNDNHYFGYSTPWGYFDFNRFHCHFSP
RDWQRLINNNWGFRPKKLSFKLFNIQVKEVTQNDGTTTIANNLTSTVQVFTDSEYQLPYVLGSA
HQGCLPPFPADVFMVPQYGYLTLNNGSQAVGRSSFYCLEYFPSQMLRTGNNFQFSYTFEDVPFH
SSYAHSQSLDRLMNPLIDQYLYYLNRTQGTTSGTTNQSRLLFSQAGPQSMSLQARNWLPGPCYR
QQRLSKTANDNNNSNFPWTAASKYHLNGRDSLVNPGPAMASHKDDEEKFFPMHGNLIFGKEGTT
ASNAELDNVMITDEEEIRTTNPVATEQYGTVANNLQSSNTAPTTRTVNDQGALPGMVWQDRDVY
LQGPIWAKIPHTDGHFHPSPLMGGFGLKHPPPQIMIKNTPVPANPPTTFSPAKFASFITQYSTG
QVSVEIEWELQKENSKRWNPEIQYTSNYNKSVNVDFTVDTNGVYSEPRPIGTRYLTRPL
LK03-X68:
pLK03-35_TAT(SEQ ID NO: 50)
MAADGYLPDWLEDNLSEGIREWWALQPGAPKPKAGRKKRRQRRRPPQNQQHQDNARGLVLPGYK
YLGPGNGLDKGEPVNAADAAALEHDKAYDQQLKAGDNPYLKYNHADAEFQERLKEDTSFGGNLG
RAVFQAKKRLLEPLGLVEEAAKTAPGKKRPVDQSPQEPDSSSGVGKSGKQPARKRLNFGQTGDS
ESVPDPQPLGEPPAAPTSLGSNTMASGGGAPMADNNEGADGVGNSSGNWHCDSQWLGDRVIITS
TRTWALPTYNNHLYKQISSQSGASNDNHYFGYSTPWGYFDFNRFHCHFSPRDWQRLINNNWGFR
PKKLSFKLFNIQVKEVTQNDGTTTIANNLTSTVQVFTDSEYQLPYVLGSAHQGCLPPFPADVFM
VPQYGYLTLNNGSQAVGRSSFYCLEYFPSQMLRTGNNFQFSYTFEDVPFHSSYAHSQSLDRLMN
PLIDQYLYYLNRTQGTTSGTTNQSRLLFSQAGPQSMSLQARNWLPGPCYRQQRLSKTANDNNNS
NFPWTAASKYHLNGRDSLVNPGPAMASHKDDEEKFFPMHGNLIFGKEGTTASNAELDNVMIIDE
EEIRTTNPVATEQYGTVANNLQSSNTAPTTRTVNDQGALPGMVWQDRDVYLQGPIWAKIPHTDG
HFHPSPLMGGFGLKHPPPQIMIKNTPVPANPPTTFSPAKFASFITQYSTGQVSVEIEWELQKEN
SKRWNPEIQYTSNYNKSVNVDFTVDTNGVYSEPRPIGTRYLTRPL
LK03-X69:
pLK03-35_KKAAAVLLPVLLAAP (SEQ ID NO: 51)
MAADGYLPDWLEDNLSEGIREWWALQPGAPKPKAKKAAAVLLPVLLAAPNQQHQDNARGLVLPG
YKYLGPGNGLDKGEPVNAADAAALEHDKAYDQQLKAGDNPYLKYNHADAEFQERLKEDTSFGGN
LGRAVFQAKKRLLEPLGLVEEAAKTAPGKKRPVDQSPQEPDSSSGVGKSGKQPARKRLNFGQTG
DSESVPDPQPLGEPPAAPTSLGSNTMASGGGAPMADNNEGADGVGNSSGNWHCDSQWLGDRVIT
TSTRTWALPTYNNHLYKQISSQSGASNDNHYFGYSTPWGYFDFNRFHCHFSPRDWQRLINNNWG
FRPKKLSFKLFNIQVKEVTQNDGTTTIANNLTSTVQVFTDSEYQLPYVLGSAHQGCLPPFPADV
FMVPQYGYLTLNNGSQAVGRSSFYCLEYFPSQMLRTGNNFQFSYTFEDVPFHSSYAHSQSLDRL
MNPLIDQYLYYLNRTQGTTSGTTNQSRLLFSQAGPQSMSLQARNWLPGPCYRQQRLSKTANDNN
NSNFPWTAASKYHLNGRDSLVNPGPAMASHKDDEEKFFPMHGNLIFGKEGTTASNAELDNVMIT
DEEEIRTTNPVATEQYGTVANNLQSSNTAPTTRTVNDQGALPGMVWQDRDVYLQGPIWAKIPHT
DGHFHPSPLMGGFGLKHPPPQIMIKNTPVPANPPTTFSPAKFASFITQYSTGQVSVEIEWELQK
ENSKRWNPEIQYTSNYNKSVNVDFTVDTNGVYSEPRPIGTRYLTRPL
LK03-X70:
pLK03-35_penetratinML(SEQ ID NO: 52)
MAADGYLPDWLEDNLSEGIREWWALQPGAPKPKARQIKIWFQNRRLKWKKGGNQQHQDNARGLV
LPGYKYLGPGNGLDKGEPVNAADAAALEHDKAYDQQLKAGDNPYLKYNHADAEFQERLKEDTSF
GGNLGRAVFQAKKRLLEPLGLVEEAAKTAPGKKRPVDQSPQEPDSSSGVGKSGKQPARKRLNFG
QTGDSESVPDPQPLGEPPAAPTSLGSNTMASGGGAPMADNNEGADGVGNSSGNWHCDSQWLGDR
VITTSTRTWALPTYNNHLYKQISSQSGASNDNHYFGYSTPWGYFDFNRFHCHFSPRDWQRLINN
NWGFRPKKLSFKLFNIQVKEVTQNDGTTTIANNLTSTVQVFTDSEYQLPYVLGSAHQGCLPPFP
ADVFMVPQYGYLTLNNGSQAVGRSSFYCLEYFPSQMLRTGNNFQFSYTFEDVPFHSSYAHSQSL
DRLMNPLIDQYLYYLNRTQGTTSGTTNQSRLLFSQAGPQSMSLQARNWLPGPCYRQQRLSKTAN
DNNNSNFPWTAASKYHLNGRDSLVNPGPAMASHKDDEEKFFPMHGNLIFGKEGTTASNAELDNV
MITDEEEIRTTNPVATEQYGTVANNLQSSNTAPTTRTVNDQGALPGMVWQDRDVYLQGPIWAKI
PHTDGHFHPSPLMGGFGLKHPPPQIMIKNTPVPANPPTTFSPAKFASFITQYSTGQVSVEIEWE
LQKENSKRWNPEIQYTSNYNKSVNVDFTVDTNGVYSEPRPIGTRYLTRPL
LK03-X71:
pLK03-35_R16 (SEQ ID NO: 53)
MAADGYLPDWLEDNLSEGIREWWALQPGAPKPKARRRRRRRRRRRRRRRRNQQHQDNARGLVLP
GYKYLGPGNGLDKGEPVNAADAAALEHDKAYDQQLKAGDNPYLKYNHADAEFQERLKEDTSFGG
NLGRAVFQAKKRLLEPLGLVEEAAKTAPGKKRPVDQSPQEPDSSSGVGKSGKQPARKRLNFGQT
GDSESVPDPQPLGEPPAAPTSLGSNTMASGGGAPMADNNEGADGVGNSSGNWHCDSQWLGDRVI
TTSTRTWALPTYNNHLYKQISSQSGASNDNHYFGYSTPWGYFDFNRFHCHFSPRDWQRLINNNW
GFRPKKLSFKLFNIQVKEVTQNDGTTTIANNLTSTVQVFTDSEYQLPYVLGSAHQGCLPPFPAD
VFMVPQYGYLTLNNGSQAVGRSSFYCLEYFPSQMLRTGNNFQFSYTFEDVPFHSSYAHSQSLDR
LMNPLIDQYLYYLNRTQGTTSGTTNQSRLLFSQAGPQSMSLQARNWLPGPCYRQQRLSKTANDN
NNSNFPWTAASKYHLNGRDSLVNPGPAMASHKDDEEKFFPMHGNLIFGKEGTTASNAELDNVMI
TDEEEIRTTNPVATEQYGTVANNLQSSNTAPTTRTVNDQGALPGMVWQDRDVYLQGPIWAKIPH
TDGHFHPSPLMGGFGLKHPPPQIMIKNTPVPANPPTTFSPAKFASFITQYSTGQVSVEIEWELQ
KENSKRWNPEIQYTSNYNKSVNVDFTVDTNGVYSEPRPIGTRYLTRPL
LK03-X72:
pLK03-35_K16 (SEQ ID NO: 54)
MAADGYLPDWLEDNLSEGIREWWALQPGAPKPKAKKKKKKKKKKKKKKKKNQQHQDNARGLVLP
GYKYLGPGNGLDKGEPVNAADAAALEHDKAYDQQLKAGDNPYLKYNHADAEFQERLKEDTSFGG
NLGRAVFQAKKRLLEPLGLVEEAAKTAPGKKRPVDQSPQEPDSSSGVGKSGKQPARKRLNFGQT
GDSESVPDPQPLGEPPAAPTSLGSNTMASGGGAPMADNNEGADGVGNSSGNWHCDSQWLGDRVI
TTSTRTWALPTYNNHLYKQISSQSGASNDNHYFGYSTPWGYFDFNRFHCHFSPRDWQRLINNNW
GFRPKKLSFKLFNIQVKEVTQNDGTTTIANNLTSTVQVFTDSEYQLPYVLGSAHQGCLPPFPAD
VFMVPQYGYLTLNNGSQAVGRSSFYCLEYFPSQMLRTGNNFQFSYTFEDVPFHSSYAHSQSLDR
LMNPLIDQYLYYLNRTQGTTSGTTNQSRLLFSQAGPQSMSLQARNWLPGPCYRQQRLSKTANDN
NNSNFPWTAASKYHLNGRDSLVNPGPAMASHKDDEEKFFPMHGNLIFGKEGTTASNAELDNVMI
TDEEEIRTTNPVATEQYGTVANNLQSSNTAPTTRTVNDQGALPGMVWQDRDVYLQGPIWAKIPH
TDGHFHPSPLMGGFGLKHPPPQIMIKNTPVPANPPTTFSPAKFASFITQYSTGQVSVEIEWELQ
KENSKRWNPEIQYTSNYNKSVNVDFTVDTNGVYSEPRPIGTRYLTRPL
LK03-X73:
pLK03-35_R16_ApoE (SEQ ID NO: 55)
MAADGYLPDWLEDNLSEGIREWWALQPGAPKPKARRRRRRRRRRRRRRRRLRVRLASHLRKLRK
RLLRDANQQHQDNARGLVLPGYKYLGPGNGLDKGEPVNAADAAALEHDKAYDQQLKAGDNPYLK
YNHADAEFQERLKEDTSFGGNLGRAVFQAKKRLLEPLGLVEEAAKTAPGKKRPVDQSPQEPDSS
SGVGKSGKQPARKRLNFGQTGDSESVPDPQPLGEPPAAPTSLGSNTMASGGGAPMADNNEGADG
VGNSSGNWHCDSQWLGDRVITTSTRTWALPTYNNHLYKQISSQSGASNDNHYFGYSTPWGYFDF
NRFHCHFSPRDWQRLINNNWGFRPKKLSFKLFNIQVKEVTQNDGTTTIANNLTSTVQVFTDSEY
QLPYVLGSAHQGCLPPFPADVFMVPQYGYLTLNNGSQAVGRSSFYCLEYFPSQMLRTGNNFQFS
YTFEDVPFHSSYAHSQSLDRLMNPLIDQYLYYLNRTQGTTSGTTNQSRLLFSQAGPQSMSLQAR
NWLPGPCYRQQRLSKTANDNNNSNFPWTAASKYHLNGRDSLVNPGPAMASHKDDEEKFFPMHGN
LIFGKEGTTASNAELDNVMITDEEEIRTTNPVATEQYGTVANNLQSSNTAPTTRTVNDQGALPG
MVWQDRDVYLQGPIWAKIPHTDGHFHPSPLMGGFGLKHPPPQIMIKNTPVPANPPTTFSPAKFA
SFITQYSTGQVSVEIEWELQKENSKRWNPEIQYTSNYNKSVNVDFTVDTNGVYSEPRPIGTRYL
TRPL
LK03-X74:
LK03-L517A-140-PAAKRVKLD (SEQ ID NO: 56)
MAADGYLPDWLEDNLSEGIREWWALQPGAPKPKANQQHQDNARGLVLPGYKYLGPGNGLDKGEP
VNAADAAALEHDKAYDQQLKAGDNPYLKYNHADAEFQERLKEDTSFGGNLGRAVFQAKKRLLEP
LGLVEEAAKTAPAAKRVKLDPGKKRPVDQSPQEPDSSSGVGKSGKQPARKRLNFGQTGDSESVP
DPQPLGEPPAAPTSLGSNTMASGGGAPMADNNEGADGVGNSSGNWHCDSQWLGDRVITTSTRTW
ALPTYNNHLYKQISSQSGASNDNHYFGYSTPWGYFDFNRFHCHFSPRDWQRLINNNWGFRPKKL
SFKLFNIQVKEVTQNDGTTTIANNLTSTVQVFTDSEYQLPYVLGSAHQGCLPPFPADVFMVPQY
GYLTLNNGSQAVGRSSFYCLEYFPSQMLRTGNNFQFSYTFEDVPFHSSYAHSQSLDRLMNPLID
QYLYYLNRTQGTTSGTTNQSRLLFSQAGPQSMSLQARNWLPGPCYRQQRLSKTANDNNNSNFPW
TAASKYHLNGRDSAVNPGPAMASHKDDEEKFFPMHGNLIFGKEGTTASNAELDNVMITDEEEIR
TTNPVATEQYGTVANNLQSSNTAPTTRTVNDQGALPGMVWQDRDVYLQGPIWAKIPHTDGHFHP
SPLMGGFGLKHPPPQIMIKNTPVPANPPTTFSPAKFASFITQYSTGQVSVEIEWELQKENSKRW
NPEIQYTSNYNKSVNVDFTVDTNGVYSEPRPIGTRYLTRPL
LK03-X75:
LK03-L517A-140hnRNP_D_NLS (SEQ ID NO: 57)
MAADGYLPDWLEDNLSEGIREWWALQPGAPKPKANQQHQDNARGLVLPGYKYLGPGNGLDKGEP
VNAADAAALEHDKAYDQQLKAGDNPYLKYNHADAEFQERLKEDTSFGGNLGRAVFQAKKRLLEP
LGLVEEAAKTAYGDYSNQQSGYGKVSRRGGHQNSYKPYPGKKRPVDQSPQEPDSSSGVGKSGKQ
PARKRLNFGQTGDSESVPDPQPLGEPPAAPTSLGSNTMASGGGAPMADNNEGADGVGNSSGNWH
CDSQWLGDRVITTSTRTWALPTYNNHLYKQISSQSGASNDNHYFGYSTPWGYFDFNRFHCHFSP
RDWQRLINNNWGFRPKKLSFKLFNIQVKEVTQNDGTTTIANNLTSTVQVFTDSEYQLPYVLGSA
HQGCLPPFPADVFMVPQYGYLTLNNGSQAVGRSSFYCLEYFPSQMLRTGNNFQFSYTFEDVPFH
SSYAHSQSLDRLMNPLIDQYLYYLNRTQGTTSGTTNQSRLLFSQAGPQSMSLQARNWLPGPCYR
QQRLSKTANDNNNSNFPWTAASKYHLNGRDSAVNPGPAMASHKDDEEKFFPMHGNLIFGKEGTT
ASNAELDNVMITDEEEIRTTNPVATEQYGTVANNLQSSNTAPTTRTVNDQGALPGMVWQDRDVY
LQGPIWAKIPHTDGHFHPSPLMGGFGLKHPPPQIMIKNTPVPANPPTTFSPAKFASFITQYSTG
QVSVEIEWELQKENSKRWNPEIQYTSNYNKSVNVDFTVDTNGVYSEPRPIGTRYLTRPL
LK03-X76:
LK03-L517A-140-class3_NLS (SEQ ID NO: 58)
MAADGYLPDWLEDNLSEGIREWWALQPGAPKPKANQQHQDNARGLVLPGYKYLGPGNGLDKGEP
VNAADAAALEHDKAYDQQLKAGDNPYLKYNHADAEFQERLKEDTSFGGNLGRAVFQAKKRLLEP
LGLVEEAAKTAAAAKRSWSAAFPGKKRPVDQSPQEPDSSSGVGKSGKQPARKRLNFGQTGDSES
VPDPQPLGEPPAAPTSLGSNTMASGGGAPMADNNEGADGVGNSSGNWHCDSQWLGDRVITTSTR
TWALPTYNNHLYKQISSQSGASNDNHYFGYSTPWGYFDFNRFHCHFSPRDWQRLINNNWGFRPK
KLSFKLFNIQVKEVTQNDGTTTIANNLTSTVQVFTDSEYQLPYVLGSAHQGCLPPFPADVFMVP
QYGYLTLNNGSQAVGRSSFYCLEYFPSQMLRTGNNFQFSYTFEDVPFHSSYAHSQSLDRLMNPL
IDQYLYYLNRTQGTTSGTTNQSRLLFSQAGPQSMSLQARNWLPGPCYRQQRLSKTANDNNNSNF
PWTAASKYHLNGRDSAVNPGPAMASHKDDEEKFFPMHGNLIFGKEGTTASNAELDNVMITDEEE
IRTTNPVATEQYGTVANNLQSSNTAPTTRTVNDQGALPGMVWQDRDVYLQGPIWAKIPHTDGHF
HPSPLMGGFGLKHPPPQIMIKNTPVPANPPTTFSPAKFASFITQYSTGQVSVEIEWELQKENSK
RWNPEIQYTSNYNKSVNVDFTVDTNGVYSEPRPIGTRYLTRPL

### Example 7

AMINO ACID SEQUENCES of SPARK100_(Spk100) and
SPARK100_(Spk100) VARIANTS

Spark100_X01:
Wild type Spark100 (SEQ ID NO: 59)
MAADGYLPDWLEDNLSEGIREWWDLKPGAPKPKANQQKQDNGRGLVLPGYKYLGPFNGLDKGEP
VNAADAAALEHDKAYDQQLQAGDNPYLRYNHADAEFQERLQEDTSFGGNLGRAVFQAKKRVLEP
LGLVESPVKTAPGKKRPVEPSPQRSPDSSTGIGKKGQQPAKKRLNFGQTGDSESVPDPQPIGEP
PAAPSGVGPNTMAAGGGAPMADNNEGADGVGSSSGNWHCDSTWLGDRVITTSTRTWALPTYNNH
LYKQISNGTSGGSTNDNTYFGYSTPWGYFDFNRFHCHFSPRDWQRLINNNWGFRPKRLNFKLFN
IQVKEVTQNEGTKTIANNLTSTIQVFTDSEYQLPYVLGSAHQGCLPPFPADVFMIPQYGYLTLN
NGSQAVGRSSFYCLEYFPSQMLRTGNNFEFSYNFEDVPFHSSYAHSQSLDRLMNPLIDQYLYYL
SRTQSTGGTAGTQQLLFSQAGPNNMSAQAKNWLPGPCYRQQRVSTILSQNNNSNFAWTGATKYH
LNGRDSLVNPGVAMATHKDDEERFFPSSGVLMFGKQGAGKDNVDYSSVMLTSEEEIKTTNPVAT
EQYGVVADNLQQQNAAPIVGAVNSQGALPGMVWQNRDVYLQGPIWAKIPHTDGNFHPSPLMGGF
GLKHPPPQILIKNTPVPADPPTTFNQAKLASFITQYSTGQVSVEIEWELQKENSKRWNPEIQYT
SNYYKSTNVDFAVNTEGTYSEPRPIGTRYLTRNL
Spark100_X02:
Spark100_K137R (SEQ ID NO: 60)
MAADGYLPDWLEDNLSEGIREWWDLKPGAPKPKANQQKQDNGRGLVLPGYKYLGPFNGLDKGEP
VNAADAAALEHDKAYDQQLQAGDNPYLRYNHADAEFQERLQEDTSFGGNLGRAVFQAKKRVLEP
LGLVESPVRTAPGKKRPVEPSPQRSPDSSTGIGKKGQQPAKKRLNFGQTGDSESVPDPQPIGEP
PAAPSGVGPNTMAAGGGAPMADNNEGADGVGSSSGNWHCDSTWLGDRVITTSTRTWALPTYNNH
LYKQISNGTSGGSTNDNTYFGYSTPWGYFDFNRFHCHFSPRDWQRLINNNWGFRPKRLNFKLFN
IQVKEVTQNEGTKTIANNLTSTIQVFTDSEYQLPYVLGSAHQGCLPPFPADVFMIPQYGYLTLN
NGSQAVGRSSFYCLEYFPSQMLRTGNNFEFSYNFEDVPFHSSYAHSQSLDRLMNPLIDQYLYYL
SRTQSTGGTAGTQQLLFSQAGPNNMSAQAKNWLPGPCYRQQRVSTTLSQNNNSNFAWTGATKYH
LNGRDSLVNPGVAMATHKDDEERFFPSSGVLMFGKQGAGKDNVDYSSVMLTSEEEIKTTNPVAT
EQYGVVADNLQQQNAAPIVGAVNSQGALPGMVWQNRDVYLQGPIWAKIPHTDGNFHPSPLMGGF
GLKHPPPQILIKNTPVPADPPTTFNQAKLASFITQYSTGQVSVEIEWELQKENSKRWNPEIQYT
SNYYKSTNVDFAVNTEGTYSEPRPIGTRYLTRNL
Spark100_X03:
Spark100_L519A (SEQ ID NO: 61)
MAADGYLPDWLEDNLSEGIREWWDLKPGAPKPKANQQKQDNGRGLVLPGYKYLGPFNGLDKGEP
VNAADAAALEHDKAYDQQLQAGDNPYLRYNHADAEFQERLQEDTSFGGNLGRAVFQAKKRVLEP
LGLVESPVKTAPGKKRPVEPSPQRSPDSSTGIGKKGQQPAKKRLNFGQTGDSESVPDPQPIGEP
PAAPSGVGPNTMAAGGGAPMADNNEGADGVGSSSGNWHCDSTWLGDRVITTSTRTWALPTYNNH
LYKQISNGTSGGSTNDNTYFGYSTPWGYFDFNRFHCHFSPRDWQRLINNNWGFRPKRLNFKLFN
IQVKEVTQNEGTKTIANNLTSTIQVFTDSEYQLPYVLGSAHQGCLPPFPADVFMIPQYGYLTLN
NGSQAVGRSSFYCLEYFPSQMLRTGNNFEFSYNFEDVPFHSSYAHSQSLDRLMNPLIDQYLYYL
SRTQSTGGTAGTQQLLFSQAGPNNMSAQAKNWLPGPCYRQQRVSTILSQNNNSNFAWTGATKYH
LNGRDSAVNPGVAMATHKDDEERFFPSSGVLMFGKQGAGKDNVDYSSVMLTSEEEIKTTNPVAT
EQYGVVADNLQQQNAAPIVGAVNSQGALPGMVWQNRDVYLQGPIWAKIPHTDGNFHPSPLMGGF
GLKHPPPQILIKNTPVPADPPTTFNQAKLASFITQYSTGQVSVEIEWELQKENSKRWNPEIQYT
SNYYKSTNVDFAVNTEGTYSEPRPIGTRYLTRNL
Spark100_X04
pSpark100-140-cmycNLS (SEQ ID NO: 62)
MAADGYLPDWLEDNLSEGIREWWDLKPGAPKPKANQQKQDNGRGLVLPGYKYLGPFNGLDKGEP
VNAADAAALEHDKAYDQQLQAGDNPYLRYNHADAEFQERLQEDTSFGGNLGRAVFQAKKRVLEP
LGLVESPVKTAPAAKRVKLDPGKKRPVEPSPQRSPDSSTGIGKKGQQPAKKRLNFGQTGDSESV
PDPQPIGEPPAAPSGVGPNTMAAGGGAPMADNNEGADGVGSSSGNWHCDSTWLGDRVITTSTRT
WALPTYNNHLYKQISNGTSGGSTNDNTYFGYSTPWGYFDFNRFHCHFSPRDWQRLINNNWGFRP
KRLNFKLFNIQVKEVTQNEGTKTIANNLTSTIQVFTDSEYQLPYVLGSAHQGCLPPFPADVFMI
PQYGYLTLNNGSQAVGRSSFYCLEYFPSQMLRTGNNFEFSYNFEDVPFHSSYAHSQSLDRLMNP
LIDQYLYYLSRTQSTGGTAGTQQLLFSQAGPNNMSAQAKNWLPGPCYRQQRVSTTLSQNNNSNF
AWTGATKYHLNGRDSLVNPGVAMATHKDDEERFFPSSGVLMFGKQGAGKDNVDYSSVMLTSEEE
IKTTNPVATEQYGVVADNLQQQNAAPIVGAVNSQGALPGMVWQNRDVYLQGPIWAKIPHTDGNF
HPSPLMGGFGLKHPPPQILIKNTPVPADPPTTFNQAKLASFITQYSTGQVSVEIEWELQKENSK
RWNPEIQYTSNYYKSTNVDFAVNTEGTYSEPRPIGTRYLTRNL
Spark100_X05
pSpark100-140-hnRNP_D_NLS (SEQ ID NO: 63)
MAADGYLPDWLEDNLSEGIREWWDLKPGAPKPKANQQKQDNGRGLVLPGYKYLGPFNGLDKGEP
VNAADAAALEHDKAYDQQLQAGDNPYLRYNHADAEFQERLQEDTSFGGNLGRAVFQAKKRVLEP
LGLVESPVKTAYGDYSNQQSGYGKVSRRGGHQNSYKPYPGKKRPVEPSPQRSPDSSTGIGKKGQ
QPAKKRLNFGQTGDSESVPDPQPIGEPPAAPSGVGPNTMAAGGGAPMADNNEGADGVGSSSGNW
HCDSTWLGDRVITTSTRTWALPTYNNHLYKQISNGTSGGSTNDNTYFGYSTPWGYFDFNRFHCH
FSPRDWQRLINNNWGFRPKRLNFKLFNIQVKEVTQNEGTKTIANNLTSTIQVFTDSEYQLPYVL
GSAHQGCLPPFPADVFMIPQYGYLTLNNGSQAVGRSSFYCLEYFPSQMLRTGNNFEFSYNFEDV
PFHSSYAHSQSLDRLMNPLIDQYLYYLSRTQSTGGTAGTQQLLFSQAGPNNMSAQAKNWLPGPC
YRQQRVSTTLSQNNNSNFAWTGATKYHLNGRDSLVNPGVAMATHKDDEERFFPSSGVLMFGKQG
AGKDNVDYSSVMLTSEEEIKTTNPVATEQYGVVADNLQQQNAAPIVGAVNSQGALPGMVWQNRD
VYLQGPIWAKIPHTDGNFHPSPLMGGFGLKHPPPQILIKNTPVPADPPTTFNQAKLASFITQYS
TGQVSVEIEWELQKENSKRWNPEIQYTSNYYKSTNVDFAVNTEGTYSEPRPIGTRYLTRNL
Spark100_X06:
pSpark100-140-class3_NLS (SEQ ID NO: 64)
MAADGYLPDWLEDNLSEGIREWWDLKPGAPKPKANQQKQDNGRGLVLPGYKYLGPFNGLDKGEP
VNAADAAALEHDKAYDQQLQAGDNPYLRYNHADAEFQERLQEDTSFGGNLGRAVFQAKKRVLEP
LGLVESPVKTAAAAKRSWSAAFPGKKRPVEPSPQRSPDSSTGIGKKGQQPAKKRLNFGQTGDSE
SVPDPQPIGEPPAAPSGVGPNTMAAGGGAPMADNNEGADGVGSSSGNWHCDSTWLGDRVITTST
RTWALPTYNNHLYKQISNGTSGGSTNDNTYFGYSTPWGYFDFNRFHCHFSPRDWQRLINNNWGF
RPKRLNFKLFNIQVKEVTQNEGTKTIANNLTSTIQVFTDSEYQLPYVLGSAHQGCLPPFPADVF
MIPQYGYLTLNNGSQAVGRSSFYCLEYFPSQMLRTGNNFEFSYNFEDVPFHSSYAHSQSLDRLM
NPLIDQYLYYLSRTQSTGGTAGTQQLLFSQAGPNNMSAQAKNWLPGPCYRQQRVSTTLSQNNNS
NFAWTGATKYHLNGRDSLVNPGVAMATHKDDEERFFPSSGVLMFGKQGAGKDNVDYSSVMLTSE
EEIKTTNPVATEQYGVVADNLQQQNAAPIVGAVNSQGALPGMVWQNRDVYLQGPIWAKIPHTDG
NFHPSPLMGGFGLKHPPPQILIKNTPVPADPPTTFNQAKLASFITQYSTGQVSVEIEWELQKEN
SKRWNPEIQYTSNYYKSTNVDFAVNTEGTYSEPRPIGTRYLTRNL
Spark100_X07:
pSpark100-140-SV40_NLS (SEQ ID NO: 65)
MAADGYLPDWLEDNLSEGIREWWDLKPGAPKPKANQQKQDNGRGLVLPGYKYLGPFNGLDKGEP
VNAADAAALEHDKAYDQQLQAGDNPYLRYNHADAEFQERLQEDTSFGGNLGRAVFQAKKRVLEP
LGLVESPVKTAPKKKRKVPGKKRPVEPSPQRSPDSSTGIGKKGQQPAKKRLNFGQTGDSESVPD
PQPIGEPPAAPSGVGPNTMAAGGGAPMADNNEGADGVGSSSGNWHCDSTWLGDRVITTSTRTWA
LPTYNNHLYKQISNGTSGGSTNDNTYFGYSTPWGYFDFNRFHCHFSPRDWQRLINNNWGFRPKR
LNFKLFNIQVKEVTQNEGTKTIANNLTSTIQVFTDSEYQLPYVLGSAHQGCLPPFPADVFMIPQ
YGYLTLNNGSQAVGRSSFYCLEYFPSQMLRTGNNFEFSYNFEDVPFHSSYAHSQSLDRLMNPLI
DQYLYYLSRTQSTGGTAGTQQLLFSQAGPNNMSAQAKNWLPGPCYRQQRVSTILSQNNNSNFAW
TGATKYHLNGRDSLVNPGVAMATHKDDEERFFPSSGVLMFGKQGAGKDNVDYSSVMLTSEEEIK
TTNPVATEQYGVVADNLQQQNAAPIVGAVNSQGALPGMVWQNRDVYLQGPIWAKIPHTDGNFHP
SPLMGGFGLKHPPPQILIKNTPVPADPPTTFNQAKLASFITQYSTGQVSVEIEWELQKENSKRW
NPEIQYTSNYYKSTNVDFAVNTEGTYSEPRPIGTRYLTRNL
Spark100_X08:
pSpark100-140-2x-cmycNLS (SEQ ID NO: 66)
MAADGYLPDWLEDNLSEGIREWWDLKPGAPKPKANQQKQDNGRGLVLPGYKYLGPFNGLDKGEP
VNAADAAALEHDKAYDQQLQAGDNPYLRYNHADAEFQERLQEDTSFGGNLGRAVFQAKKRVLEP
LGLVESPVKTAPAAKRVKLDEDPAAKRVKLDPGKKRPVEPSPQRSPDSSTGIGKKGQQPAKKRL
NFGQTGDSESVPDPQPIGEPPAAPSGVGPNTMAAGGGAPMADNNEGADGVGSSSGNWHCDSTWL
GDRVITTSTRTWALPTYNNHLYKQISNGTSGGSTNDNTYFGYSTPWGYFDFNRFHCHFSPRDWQ
RLINNNWGFRPKRLNFKLFNIQVKEVTQNEGTKTIANNLTSTIQVFTDSEYQLPYVLGSAHQGC
LPPFPADVFMIPQYGYLTLNNGSQAVGRSSFYCLEYFPSQMLRTGNNFEFSYNFEDVPFHSSYA
HSQSLDRLMNPLIDQYLYYLSRTQSTGGTAGTQQLLFSQAGPNNMSAQAKNWLPGPCYRQQRVS
TTLSQNNNSNFAWTGATKYHLNGRDSLVNPGVAMATHKDDEERFFPSSGVLMFGKQGAGKDNVD
YSSVMLTSEEEIKTTNPVATEQYGVVADNLQQQNAAPIVGAVNSQGALPGMVWQNRDVYLQGPI
WAKIPHTDGNFHPSPLMGGFGLKHPPPQILIKNTPVPADPPTTFNQAKLASFITQYSTGQVSVE
IEWELQKENSKRWNPEIQYTSNYYKSTNVDFAVNTEGTYSEPRPIGTRYLTRNL
Spark100_X09
pSpark100-140-2x class3_NLS (SEQ ID NO: 67)
MAADGYLPDWLEDNLSEGIREWWDLKPGAPKPKANQQKQDNGRGLVLPGYKYLGPFNGLDKGEP
VNAADAAALEHDKAYDQQLQAGDNPYLRYNHADAEFQERLQEDTSFGGNLGRAVFQAKKRVLEP
LGLVESPVKTAAAAKRSWSAAFEDAAAKRSWSAAFPGKKRPVEPSPQRSPDSSTGIGKKGQQPA
KKRLNFGQTGDSESVPDPQPIGEPPAAPSGVGPNTMAAGGGAPMADNNEGADGVGSSSGNWHCD
STWLGDRVITTSTRTWALPTYNNHLYKQISNGTSGGSTNDNTYFGYSTPWGYFDFNRFHCHFSP
RDWQRLINNNWGFRPKRLNFKLFNIQVKEVTQNEGTKTIANNLTSTIQVFTDSEYQLPYVLGSA
HQGCLPPFPADVFMIPQYGYLTLNNGSQAVGRSSFYCLEYFPSQMLRTGNNFEFSYNFEDVPFH
SSYAHSQSLDRLMNPLIDQYLYYLSRTQSTGGTAGTQQLLFSQAGPNNMSAQAKNWLPGPCYRQ
QRVSTTLSQNNNSNFAWTGATKYHLNGRDSLVNPGVAMATHKDDEERFFPSSGVLMFGKQGAGK
DNVDYSSVMLTSEEEIKTTNPVATEQYGVVADNLQQQNAAPIVGAVNSQGALPGMVWQNRDVYL
QGPIWAKIPHTDGNFHPSPLMGGFGLKHPPPQILIKNTPVPADPPTTFNQAKLASFITQYSTGQ
VSVEIEWELQKENSKRWNPEIQYTSNYYKSTNVDFAVNTEGTYSEPRPIGTRYLTRNL
Spark100_X10:
pSpark100-140-2xSV40 NLS (SEQ ID NO: 68)
MAADGYLPDWLEDNLSEGIREWWDLKPGAPKPKANQQKQDNGRGLVLPGYKYLGPFNGLDKGEP
VNAADAAALEHDKAYDQQLQAGDNPYLRYNHADAEFQERLQEDTSFGGNLGRAVFQAKKRVLEP
LGLVESPVKTAPKKKRKVEDPKKKRKVPGKKRPVEPSPQRSPDSSTGIGKKGQQPAKKRLNFGQ
TGDSESVPDPQPIGEPPAAPSGVGPNTMAAGGGAPMADNNEGADGVGSSSGNWHCDSTWLGDRV
ITTSTRTWALPTYNNHLYKQISNGTSGGSTNDNTYFGYSTPWGYFDFNRFHCHFSPRDWQRLIN
NNWGFRPKRLNFKLFNIQVKEVTQNEGTKTIANNLTSTIQVFTDSEYQLPYVLGSAHQGCLPPF
PADVFMIPQYGYLTLNNGSQAVGRSSFYCLEYFPSQMLRTGNNFEFSYNFEDVPFHSSYAHSQS
LDRLMNPLIDQYLYYLSRTQSTGGTAGTQQLLFSQAGPNNMSAQAKNWLPGPCYRQQRVSTTLS
QNNNSNFAWTGATKYHLNGRDSLVNPGVAMATHKDDEERFFPSSGVLMFGKQGAGKDNVDYSSV
MLTSEEEIKTTNPVATEQYGVVADNLQQQNAAPIVGAVNSQGALPGMVWQNRDVYLQGPIWAKI
PHTDGNFHPSPLMGGFGLKHPPPQILIKNTPVPADPPTTFNQAKLASFITQYSTGQVSVEIEWE
LQKENSKRWNPEIQYTSNYYKSTNVDFAVNTEGTYSEPRPIGTRYLTRNL
Spark100_X11:
pSpark100-140-1x class3_NLS-1x cmycNLS (SEQ ID NO: 69)
MAADGYLPDWLEDNLSEGIREWWDLKPGAPKPKANQQKQDNGRGLVLPGYKYLGPFNGLDKGEP
VNAADAAALEHDKAYDQQLQAGDNPYLRYNHADAEFQERLQEDTSFGGNLGRAVFQAKKRVLEP
LGLVESPVKTAAAAKRSWSAAFEDPAAKRVKLDPGKKRPVEPSPQRSPDSSTGIGKKGQQPAKK
RLNFGQTGDSESVPDPQPIGEPPAAPSGVGPNTMAAGGGAPMADNNEGADGVGSSSGNWHCDST
WLGDRVITTSTRTWALPTYNNHLYKQISNGTSGGSTNDNTYFGYSTPWGYFDFNRFHCHFSPRD
WQRLINNNWGFRPKRLNFKLFNIQVKEVTQNEGTKTIANNLTSTIQVFTDSEYQLPYVLGSAHQ
GCLPPFPADVFMIPQYGYLTLNNGSQAVGRSSFYCLEYFPSQMLRTGNNFEFSYNFEDVPFHSS
YAHSQSLDRLMNPLIDQYLYYLSRTQSTGGTAGTQQLLFSQAGPNNMSAQAKNWLPGPCYRQQR
VSTTLSQNNNSNFAWTGATKYHLNGRDSLVNPGVAMATHKDDEERFFPSSGVLMFGKQGAGKDN
VDYSSVMLTSEEEIKTTNPVATEQYGVVADNLQQQNAAPIVGAVNSQGALPGMVWQNRDVYLQG
PIWAKIPHTDGNFHPSPLMGGFGLKHPPPQILIKNTPVPADPPTTFNQAKLASFITQYSTGQVS
VEIEWELQKENSKRWNPEIQYTSNYYKSTNVDFAVNTEGTYSEPRPIGTRYLTRNL
Spark100_X12:
pSpark100-140-1x cmycNLS-1x class3_NLS (SEQ ID NO: 70)
MAADGYLPDWLEDNLSEGIREWWDLKPGAPKPKANQQKQDNGRGLVLPGYKYLGPFNGLDKGEP
VNAADAAALEHDKAYDQQLQAGDNPYLRYNHADAEFQERLQEDTSFGGNLGRAVFQAKKRVLEP
LGLVESPVKTAPAAKRVKLDEDAAAKRSWSAAFPGKKRPVEPSPQRSPDSSTGIGKKGQQPAKK
RLNFGQTGDSESVPDPQPIGEPPAAPSGVGPNTMAAGGGAPMADNNEGADGVGSSSGNWHCDST
WLGDRVITTSTRTWALPTYNNHLYKQISNGTSGGSTNDNTYFGYSTPWGYFDFNRFHCHFSPRD
WQRLINNNWGFRPKRLNFKLFNIQVKEVTQNEGTKTIANNLTSTIQVFTDSEYQLPYVLGSAHQ
GCLPPFPADVFMIPQYGYLTLNNGSQAVGRSSFYCLEYFPSQMLRTGNNFEFSYNFEDVPFHSS
YAHSQSLDRLMNPLIDQYLYYLSRTQSTGGTAGTQQLLFSQAGPNNMSAQAKNWLPGPCYRQQR
VSTTLSQNNNSNFAWTGATKYHLNGRDSLVNPGVAMATHKDDEERFFPSSGVLMFGKQGAGKDN
VDYSSVMLTSEEEIKTTNPVATEQYGVVADNLQQQNAAPIVGAVNSQGALPGMVWQNRDVYLQG
PIWAKIPHTDGNFHPSPLMGGFGLKHPPPQILIKNTPVPADPPTTFNQAKLASFITQYSTGQVS
VEIEWELQKENSKRWNPEIQYTSNYYKSTNVDFAVNTEGTYSEPRPIGTRYLTRNL
Spark100_X13:
pSpark100-140-3xSV40 NLS (SEQ ID NO: 71)
MAADGYLPDWLEDNLSEGIREWWDLKPGAPKPKANQQKQDNGRGLVLPGYKYLGPFNGLDKGEP
VNAADAAALEHDKAYDQQLQAGDNPYLRYNHADAEFQERLQEDTSFGGNLGRAVFQAKKRVLEP
LGLVESPVKTAPKKKRKVEDPKKKRKVEDPKKKRKVPGKKRPVEPSPQRSPDSSTGIGKKGQQP
AKKRLNFGQTGDSESVPDPQPIGEPPAAPSGVGPNTMAAGGGAPMADNNEGADGVGSSSGNWHC
DSTWLGDRVITTSTRTWALPTYNNHLYKQISNGTSGGSTNDNTYFGYSTPWGYFDFNRFHCHFS
PRDWQRLINNNWGFRPKRLNFKLFNIQVKEVTQNEGTKTIANNLTSTIQVFTDSEYQLPYVLGS
AHQGCLPPFPADVFMIPQYGYLTLNNGSQAVGRSSFYCLEYFPSQMLRTGNNFEFSYNFEDVPF
HSSYAHSQSLDRLMNPLIDQYLYYLSRTQSTGGTAGTQQLLFSQAGPNNMSAQAKNWLPGPCYR
QQRVSTTLSQNNNSNFAWTGATKYHLNGRDSLVNPGVAMATHKDDEERFFPSSGVLMFGKQGAG
KDNVDYSSVMLTSEEEIKTTNPVATEQYGVVADNLQQQNAAPIVGAVNSQGALPGMVWQNRDVY
LQGPIWAKIPHTDGNFHPSPLMGGFGLKHPPPQILIKNTPVPADPPTTFNQAKLASFITQYSTG
QVSVEIEWELQKENSKRWNPEIQYTSNYYKSTNVDFAVNTEGTYSEPRPIGTRYLTRNL
Spark100_X14:
pSpark100-140-3x-cmycNLS (SEQ ID NO: 72)
MAADGYLPDWLEDNLSEGIREWWDLKPGAPKPKANQQKQDNGRGLVLPGYKYLGPFNGLDKGEP
VNAADAAALEHDKAYDQQLQAGDNPYLRYNHADAEFQERLQEDTSFGGNLGRAVFQAKKRVLEP
LGLVESPVKTAPAAKRVKLDEDPAAKRVKLDEDPAAKRVKLDPGKKRPVEPSPQRSPDSSTGIG
KKGQQPAKKRLNFGQTGDSESVPDPQPIGEPPAAPSGVGPNTMAAGGGAPMADNNEGADGVGSS
SGNWHCDSTWLGDRVITTSTRTWALPTYNNHLYKQISNGTSGGSTNDNTYFGYSTPWGYFDFNR
FHCHFSPRDWQRLINNNWGFRPKRLNFKLFNIQVKEVTQNEGTKTIANNLTSTIQVFTDSEYQL
PYVLGSAHQGCLPPFPADVFMIPQYGYLTLNNGSQAVGRSSFYCLEYFPSQMLRTGNNFEFSYN
FEDVPFHSSYAHSQSLDRLMNPLIDQYLYYLSRTQSTGGTAGTQQLLFSQAGPNNMSAQAKNWL
PGPCYRQQRVSTTLSQNNNSNFAWTGATKYHLNGRDSLVNPGVAMATHKDDEERFFPSSGVLMF
GKQGAGKDNVDYSSVMLTSEEEIKTTNPVATEQYGVVADNLQQQNAAPIVGAVNSQGALPGMVW
QNRDVYLQGPIWAKIPHTDGNFHPSPLMGGFGLKHPPPQILIKNTPVPADPPTTFNQAKLASFI
TQYSTGQVSVEIEWELQKENSKRWNPEIQYTSNYYKSTNVDFAVNTEGTYSEPRPIGTRYLTRN
L
Spark100_X15:
pSpark100-140-3x class3_NLS (SEQ ID NO: 73)
MAADGYLPDWLEDNLSEGIREWWDLKPGAPKPKANQQKQDNGRGLVLPGYKYLGPFNGLDKGEP
VNAADAAALEHDKAYDQQLQAGDNPYLRYNHADAEFQERLQEDTSFGGNLGRAVFQAKKRVLEP
LGLVESPVKTAAAAKRSWSAAFEDAAAKASWSAAFEDAAAKRSWSAAFPGKKRPVEPSPQRSPD
SSTGIGKKGQQPAKKRLNFGQTGDSESVPDPQPIGEPPAAPSGVGPNTMAAGGGAPMADNNEGA
DGVGSSSGNWHCDSTWLGDRVITTSTRTWALPTYNNHLYKQISNGTSGGSTNDNTYFGYSTPWG
YFDFNRFHCHFSPRDWQRLINNNWGFRPKRLNFKLFNIQVKEVTQNEGTKTIANNLTSTIQVFT
DSEYQLPYVLGSAHQGCLPPFPADVFMIPQYGYLTLNNGSQAVGRSSFYCLEYFPSQMLRTGNN
FEFSYNFEDVPFHSSYAHSQSLDRLMNPLIDQYLYYLSRTQSTGGTAGTQQLLFSQAGPNNMSA
QAKNWLPGPCYRQQRVSTTLSQNNNSNFAWTGATKYHLNGRDSLVNPGVAMATHKDDEERFFPS
SGVLMFGKQGAGKDNVDYSSVMLTSEEEIKTTNPVATEQYGVVADNLQQQNAAPIVGAVNSQGA
LPGMVWQNRDVYLQGPIWAKIPHTDGNFHPSPLMGGFGLKHPPPQILIKNTPVPADPPTTFNQA
KLASFITQYSTGQVSVEIEWELQKENSKRWNPEIQYTSNYYKSTNVDFAVNTEGTYSEPRPIGT
RYLTRNL
Spark100_X16:
pSpark100-140-2xcmycNLS-1x class3_NLS (SEQ ID NO: 74)
MAADGYLPDWLEDNLSEGIREWWDLKPGAPKPKANQQKQDNGRGLVLPGYKYLGPFNGLDKGEP
VNAADAAALEHDKAYDQQLQAGDNPYLRYNHADAEFQERLQEDTSFGGNLGRAVFQAKKRVLEP
LGLVESPVKTAPAAKRVKLDEDPAAKRVKLDEDAAAKRSWSAAFPGKKRPVEPSPQRSPDSSTG
IGKKGQQPAKKRLNFGQTGDSESVPDPQPIGEPPAAPSGVGPNTMAAGGGAPMADNNEGADGVG
SSSGNWHCDSTWLGDRVITTSTRTWALPTYNNHLYKQISNGTSGGSTNDNTYFGYSTPWGYFDF
NRFHCHFSPRDWQRLINNNWGFRPKRLNFKLFNIQVKEVTQNEGTKTIANNLTSTIQVFTDSEY
QLPYVLGSAHQGCLPPFPADVFMIPQYGYLTLNNGSQAVGRSSFYCLEYFPSQMLRTGNNFEFS
YNFEDVPFHSSYAHSQSLDRLMNPLIDQYLYYLSRTQSTGGTAGTQQLLFSQAGPNNMSAQAKN
WLPGPCYRQQRVSTTLSQNNNSNFAWTGATKYHLNGRDSLVNPGVAMATHKDDEERFFPSSGVL
MFGKQGAGKDNVDYSSVMLTSEEEIKTTNPVATEQYGVVADNLQQQNAAPIVGAVNSQGALPGM
VWQNRDVYLQGPIWAKIPHTDGNFHPSPLMGGFGLKHPPPQILIKNTPVPADPPTTFNQAKLAS
FITQYSTGQVSVEIEWELQKENSKRWNPEIQYTSNYYKSTNVDFAVNTEGTYSEPRPIGTRYLT
RNL
Spark100_X17:
pSpark100-140-2x class3_NLS-1x cmycNLS (SEQ ID NO: 75)
MAADGYLPDWLEDNLSEGIREWWDLKPGAPKPKANQQKQDNGRGLVLPGYKYLGPFNGLDKGEP
VNAADAAALEHDKAYDQQLQAGDNPYLRYNHADAEFQERLQEDTSFGGNLGRAVFQAKKRVLEP
LGLVESPVKTAAAAKRSWSAAFEDAAAKRSWSAAFEDPAAKRVKLDPGKKRPVEPSPQRSPDSS
TGIGKKGQQPAKKRLNFGQTGDSESVPDPQPIGEPPAAPSGVGPNTMAAGGGAPMADNNEGADG
VGSSSGNWHCDSTWLGDRVITTSTRTWALPTYNNHLYKQISNGTSGGSTNDNTYFGYSTPWGYF
DFNRFHCHFSPRDWQRLINNNWGFRPKRLNFKLFNIQVKEVTQNEGTKTIANNLTSTIQVFTDS
EYQLPYVLGSAHQGCLPPFPADVFMIPQYGYLTLNNGSQAVGRSSFYCLEYFPSQMLRTGNNFE
FSYNFEDVPFHSSYAHSQSLDRLMNPLIDQYLYYLSRTQSTGGTAGTQQLLFSQAGPNNMSAQA
KNWLPGPCYRQQRVSTTLSQNNNSNFAWTGATKYHLNGRDSLVNPGVAMATHKDDEERFFPSSG
VLMFGKQGAGKDNVDYSSVMLTSEEEIKTTNPVATEQYGVVADNLQQQNAAPIVGAVNSQGALP
GMVWQNRDVYLQGPIWAKIPHTDGNFHPSPLMGGFGLKHPPPQILIKNTPVPADPPTTFNQAKL
ASFITQYSTGQVSVEIEWELQKENSKRWNPEIQYTSNYYKSTNVDFAVNTEGTYSEPRPIGTRY
LTRNL
Spark100_X18:
pSpark100-140-1x hnRNP_D_NLS-1xclass3NLS-1x cmycNLS
(SEQ ID NO: 76)
MAADGYLPDWLEDNLSEGIREWWDLKPGAPKPKANQQKQDNGRGLVLPGYKYLGPFNGLDKGEP
VNAADAAALEHDKAYDQQLQAGDNPYLRYNHADAEFQERLQEDTSFGGNLGRAVFQAKKRVLEP
LGLVESPVKTAYGDYSNQQSGYGKVSRRGGHQNSYKPYEDAAAKRSWSAAFEDPAAKRVKLDPG
KKRPVEPSPQRSPDSSTGIGKKGQQPAKKRLNFGQTGDSESVPDPQPIGEPPAAPSGVGPNTMA
AGGGAPMADNNEGADGVGSSSGNWHCDSTWLGDRVITTSTRTWALPTYNNHLYKQISNGTSGGS
TNDNTYFGYSTPWGYFDFNRFHCHFSPRDWQRLINNNWGFRPKRLNFKLFNIQVKEVTQNEGTK
TIANNLTSTIQVFTDSEYQLPYVLGSAHQGCLPPFPADVFMIPQYGYLTLNNGSQAVGRSSFYC
LEYFPSQMLRTGNNFEFSYNFEDVPFHSSYAHSQSLDRLMNPLIDQYLYYLSRTQSTGGTAGTQ
QLLFSQAGPNNMSAQAKNWLPGPCYRQQRVSTILSQNNNSNFAWTGATKYHLNGRDSLVNPGVA
MATHKDDEERFFPSSGVLMFGKQGAGKDNVDYSSVMLTSEEEIKTTNPVATEQYGVVADNLQQQ
NAAPIVGAVNSQGALPGMVWQNRDVYLQGPIWAKIPHTDGNFHPSPLMGGFGLKHPPPQILIKN
TPVPADPPTTFNQAKLASFITQYSTGQVSVEIEWELQKENSKRWNPEIQYTSNYYKSTNVDFAV
NTEGTYSEPRPIGTRYLTRNL
Spark100_X19:
pSpark100_L519A-140-cmycNLS (SEQ ID NO: 77)
MAADGYLPDWLEDNLSEGIREWWDLKPGAPKPKANQQKQDNGRGLVLPGYKYLGPFNGLDKGEP
VNAADAAALEHDKAYDQQLQAGDNPYLRYNHADAEFQERLQEDTSFGGNLGRAVFQAKKRVLEP
LGLVESPVKTAPAAKRVKLDPGKKRPVEPSPQRSPDSSTGIGKKGQQPAKKRLNFGQTGDSESV
PDPQPIGEPPAAPSGVGPNTMAAGGGAPMADNNEGADGVGSSSGNWHCDSTWLGDRVITTSTRT
WALPTYNNHLYKQISNGTSGGSTNDNTYFGYSTPWGYFDFNRFHCHFSPRDWQRLINNNWGFRP
KRLNFKLFNIQVKEVTQNEGTKTIANNLTSTIQVFTDSEYQLPYVLGSAHQGCLPPFPADVFMI
PQYGYLTLNNGSQAVGRSSFYCLEYFPSQMLRTGNNFEFSYNFEDVPFHSSYAHSQSLDRLMNP
LIDQYLYYLSRTQSTGGTAGTQQLLFSQAGPNNMSAQAKNWLPGPCYRQQRVSTTLSQNNNSNF
AWTGATKYHLNGRDSAVNPGVAMATHKDDEERFFPSSGVLMFGKQGAGKDNVDYSSVMLTSEEE
IKTTNPVATEQYGVVADNLQQQNAAPIVGAVNSQGALPGMVWQNRDVYLQGPIWAKIPHTDGNF
HPSPLMGGFGLKHPPPQILIKNTPVPADPPTTFNQAKLASFITQYSTGQVSVEIEWELQKENSK
RWNPEIQYTSNYYKSTNVDFAVNTEGTYSEPRPIGTRYLTRNL
Spark100_X20
pSpark100-163-cmycNLS (SEQ ID NO: 78)
MAADGYLPDWLEDNLSEGIREWWDLKPGAPKPKANQQKQDNGRGLVLPGYKYLGPFNGLDKGEP
VNAADAAALEHDKAYDQQLQAGDNPYLRYNHADAEFQERLQEDTSFGGNLGRAVFQAKKRVLEP
LGLVESPVKTAPGKKRPVEPSPQRSPDSSTGIGKPAAKRVKLDKGQQPAKKRLNFGQTGDSESV
PDPQPIGEPPAAPSGVGPNTMAAGGGAPMADNNEGADGVGSSSGNWHCDSTWLGDRVITTSTRT
WALPTYNNHLYKQISNGTSGGSTNDNTYFGYSTPWGYFDFNRFHCHFSPRDWQRLINNNWGFRP
KRLNFKLFNIQVKEVTQNEGTKTIANNLTSTIQVFTDSEYQLPYVLGSAHQGCLPPFPADVFMI
PQYGYLTLNNGSQAVGRSSFYCLEYFPSQMLRTGNNFEFSYNFEDVPFHSSYAHSQSLDRLMNP
LIDQYLYYLSRTQSTGGTAGTQQLLFSQAGPNNMSAQAKNWLPGPCYRQQRVSTTLSQNNNSNF
AWTGATKYHLNGRDSLVNPGVAMATHKDDEERFFPSSGVLMFGKQGAGKDNVDYSSVMLTSEEE
IKTTNPVATEQYGVVADNLQQQNAAPIVGAVNSQGALPGMVWQNRDVYLQGPIWAKIPHTDGNF
HPSPLMGGFGLKHPPPQILIKNTPVPADPPTTFNQAKLASFITQYSTGQVSVEIEWELQKENSK
RWNPEIQYTSNYYKSTNVDFAVNTEGTYSEPRPIGTRYLTRNL
Spark100_X21:
pSpark100-163-2x-cmycNLS (SEQ ID NO: 79)
MAADGYLPDWLEDNLSEGIREWWDLKPGAPKPKANQQKQDNGRGLVLPGYKYLGPFNGLDKGEP
VNAADAAALEHDKAYDQQLQAGDNPYLRYNHADAEFQERLQEDTSFGGNLGRAVFQAKKRVLEP
LGLVESPVKTAPGKKRPVEPSPQRSPDSSTGIGKPAAKRVKLDEDPAAKRVKLDKGQQPAKKRL
NFGQTGDSESVPDPQPIGEPPAAPSGVGPNTMAAGGGAPMADNNEGADGVGSSSGNWHCDSTWL
GDRVITTSTRTWALPTYNNHLYKQISNGTSGGSTNDNTYFGYSTPWGYFDFNRFHCHFSPRDWQ
RLINNNWGFRPKRLNFKLFNIQVKEVTQNEGTKTIANNLTSTIQVFTDSEYQLPYVLGSAHQGC
LPPFPADVFMIPQYGYLTLNNGSQAVGRSSFYCLEYFPSQMLRTGNNFEFSYNFEDVPFHSSYA
HSQSLDRLMNPLIDQYLYYLSRTQSTGGTAGTQQLLFSQAGPNNMSAQAKNWLPGPCYRQQRVS
TTLSQNNNSNFAWTGATKYHLNGRDSLVNPGVAMATHKDDEERFFPSSGVLMFGKQGAGKDNVD
YSSVMLTSEEEIKTTNPVATEQYGVVADNLQQQNAAPIVGAVNSQGALPGMVWQNRDVYLQGPI
WAKIPHTDGNFHPSPLMGGFGLKHPPPQILIKNTPVPADPPTTFNQAKLASFITQYSTGQVSVE
IEWELQKENSKRWNPEIQYTSNYYKSTNVDFAVNTEGTYSEPRPIGTRYLTRNL
Spark100_X22:
pSpark100-163-SV40 NLS (SEQ ID NO: 80)
MAADGYLPDWLEDNLSEGIREWWDLKPGAPKPKANQQKQDNGRGLVLPGYKYLGPFNGLDKGEP
VNAADAAALEHDKAYDQQLQAGDNPYLRYNHADAEFQERLQEDTSFGGNLGRAVFQAKKRVLEP
LGLVESPVKTAPGKKRPVEPSPQRSPDSSTGIGKPKKKRKVKGQQPAKKRLNFGQTGDSESVPD
PQPIGEPPAAPSGVGPNTMAAGGGAPMADNNEGADGVGSSSGNWHCDSTWLGDRVITTSTRTWA
LPTYNNHLYKQISNGTSGGSTNDNTYFGYSTPWGYFDFNRFHCHFSPRDWQRLINNNWGFRPKR
LNFKLFNIQVKEVTQNEGTKTIANNLTSTIQVFTDSEYQLPYVLGSAHQGCLPPFPADVFMIPQ
YGYLTLNNGSQAVGRSSFYCLEYFPSQMLRTGNNFEFSYNFEDVPFHSSYAHSQSLDRLMNPLI
DQYLYYLSRTQSTGGTAGTQQLLFSQAGPNNMSAQAKNWLPGPCYRQQRVSTILSQNNNSNFAW
TGATKYHLNGRDSLVNPGVAMATHKDDEERFFPSSGVLMFGKQGAGKDNVDYSSVMLTSEEEIK
TTNPVATEQYGVVADNLQQQNAAPIVGAVNSQGALPGMVWQNRDVYLQGPIWAKIPHTDGNFHP
SPLMGGFGLKHPPPQILIKNTPVPADPPTTFNQAKLASFITQYSTGQVSVEIEWELQKENSKRW
NPEIQYTSNYYKSTNVDFAVNTEGTYSEPRPIGTRYLTRNL
Spark100_X23
pSpark100-163-2x-SV40 (SEQ ID NO: 81)
MAADGYLPDWLEDNLSEGIREWWDLKPGAPKPKANQQKQDNGRGLVLPGYKYLGPFNGLDKGEP
VNAADAAALEHDKAYDQQLQAGDNPYLRYNHADAEFQERLQEDTSFGGNLGRAVFQAKKRVLEP
LGLVESPVKTAPGKKRPVEPSPQRSPDSSTGIGKPKKKRKVEDPKKKRKVKGQQPAKKRLNFGQ
TGDSESVPDPQPIGEPPAAPSGVGPNTMAAGGGAPMADNNEGADGVGSSSGNWHCDSTWLGDRV
ITTSTRTWALPTYNNHLYKQISNGTSGGSTNDNTYFGYSTPWGYFDFNRFHCHFSPRDWQRLIN
NNWGFRPKRLNFKLFNIQVKEVTQNEGTKTIANNLTSTIQVFTDSEYQLPYVLGSAHQGCLPPF
PADVFMIPQYGYLTLNNGSQAVGRSSFYCLEYFPSQMLRTGNNFEFSYNFEDVPFHSSYAHSQS
LDRLMNPLIDQYLYYLSRTQSTGGTAGTQQLLFSQAGPNNMSAQAKNWLPGPCYRQQRVSTTLS
QNNNSNFAWTGATKYHLNGRDSLVNPGVAMATHKDDEERFFPSSGVLMFGKQGAGKDNVDYSSV
MLTSEEEIKTTNPVATEQYGVVADNLQQQNAAPIVGAVNSQGALPGMVWQNRDVYLQGPIWAKI
PHTDGNFHPSPLMGGFGLKHPPPQILIKNTPVPADPPTTFNQAKLASFITQYSTGQVSVEIEWE
LQKENSKRWNPEIQYTSNYYKSTNVDFAVNTEGTYSEPRPIGTRYLTRNL
Spark100_X24:
pSpark100-163-class3NLS (SEQ ID NO: 82)
MAADGYLPDWLEDNLSEGIREWWDLKPGAPKPKANQQKQDNGRGLVLPGYKYLGPFNGLDKGEP
VNAADAAALEHDKAYDQQLQAGDNPYLRYNHADAEFQERLQEDTSFGGNLGRAVFQAKKRVLEP
LGLVESPVKTAPGKKRPVEPSPQRSPDSSTGIGKAAAKRSWSAAFKGQQPAKKRLNFGQTGDSE
SVPDPQPIGEPPAAPSGVGPNTMAAGGGAPMADNNEGADGVGSSSGNWHCDSTWLGDRVITTST
RTWALPTYNNHLYKQISNGTSGGSTNDNTYFGYSTPWGYFDFNRFHCHFSPRDWQRLINNNWGF
RPKRLNFKLFNIQVKEVTQNEGTKTIANNLTSTIQVFTDSEYQLPYVLGSAHQGCLPPFPADVF
MIPQYGYLTLNNGSQAVGRSSFYCLEYFPSQMLRTGNNFEFSYNFEDVPFHSSYAHSQSLDRLM
NPLIDQYLYYLSRTQSTGGTAGTQQLLFSQAGPNNMSAQAKNWLPGPCYRQQRVSTTLSQNNNS
NFAWTGATKYHLNGRDSLVNPGVAMATHKDDEERFFPSSGVLMFGKQGAGKDNVDYSSVMLTSE
EEIKTTNPVATEQYGVVADNLQQQNAAPIVGAVNSQGALPGMVWQNRDVYLQGPIWAKIPHTDG
NFHPSPLMGGFGLKHPPPQILIKNTPVPADPPTTFNQAKLASFITQYSTGQVSVEIEWELQKEN
SKRWNPEIQYTSNYYKSTNVDFAVNTEGTYSEPRPIGTRYLTRNL
Spark100_X25:
pSpark100-163-2x-c1ass3NLS (SEQ ID NO: 83)
MAADGYLPDWLEDNLSEGIREWWDLKPGAPKPKANQQKQDNGRGLVLPGYKYLGPFNGLDKGEP
VNAADAAALEHDKAYDQQLQAGDNPYLRYNHADAEFQERLQEDTSFGGNLGRAVFQAKKRVLEP
LGLVESPVKTAPGKKRPVEPSPQRSPDSSTGIGKAAAKRSWSAAFEDAAAKRSWSAAFKGQQPA
KKRLNFGQTGDSESVPDPQPIGEPPAAPSGVGPNTMAAGGGAPMADNNEGADGVGSSSGNWHCD
STWLGDRVITTSTRTWALPTYNNHLYKQISNGTSGGSTNDNTYFGYSTPWGYFDFNRFHCHFSP
RDWQRLINNNWGFRPKRLNFKLFNIQVKEVTQNEGTKTIANNLTSTIQVFTDSEYQLPYVLGSA
HQGCLPPFPADVFMIPQYGYLTLNNGSQAVGRSSFYCLEYFPSQMLRTGNNFEFSYNFEDVPFH
SSYAHSQSLDRLMNPLIDQYLYYLSRTQSTGGTAGTQQLLFSQAGPNNMSAQAKNWLPGPCYRQ
QRVSTTLSQNNNSNFAWTGATKYHLNGRDSLVNPGVAMATHKDDEERFFPSSGVLMFGKQGAGK
DNVDYSSVMLTSEEEIKTTNPVATEQYGVVADNLQQQNAAPIVGAVNSQGALPGMVWQNRDVYL
QGPIWAKIPHTDGNFHPSPLMGGFGLKHPPPQILIKNTPVPADPPTTFNQAKLASFITQYSTGQ
VSVEIEWELQKENSKRWNPEIQYTSNYYKSTNVDFAVNTEGTYSEPRPIGTRYLTRNL
Spark100-X42:
Spark100-33-cmycNLS (SEQ ID NO: 105)
MAADGYLPDWLEDNLSEGIREWWDLKPGAPKPPAAKRVKLDKANQQKQDNGRGLVLPGYKYLGP
FNGLDKGEPVNAADAAALEHDKAYDQQLQAGDNPYLRYNHADAEFQERLQEDTSFGGNLGRAVF
QAKKRVLEPLGLVESPVKTAPGKKRPVEPSPQRSPDSSTGIGKKGQQPAKKRLNFGQTGDSESV
PDPQPIGEPPAAPSGVGPNTMAAGGGAPMADNNEGADGVGSSSGNWHCDSTWLGDRVITTSTRT
WALPTYNNHLYKQISNGTSGGSTNDNTYFGYSTPWGYFDFNRFHCHFSPRDWQRLINNNWGFRP
KRLNFKLFNIQVKEVTQNEGTKTIANNLTSTIQVFTDSEYQLPYVLGSAHQGCLPPFPADVFMI
PQYGYLTLNNGSQAVGRSSFYCLEYFPSQMLRTGNNFEFSYNFEDVPFHSSYAHSQSLDRLMNP
LIDQYLYYLSRTQSTGGTAGTQQLLFSQAGPNNMSAQAKNWLPGPCYRQQRVSTTLSQNNNSNF
AWTGATKYHLNGRDSLVNPGVAMATHKDDEERFFPSSGVLMFGKQGAGKDNVDYSSVMLTSEEE
IKTTNPVATEQYGVVADNLQQQNAAPIVGAVNSQGALPGMVWQNRDVYLQGPIWAKIPHTDGNF
HPSPLMGGFGLKHPPPQILIKNTPVPADPPTTFNQAKLASFITQYSTGQVSVEIEWELQKENSK
RWNPEIQYTSNYYKSTNVDFAVNTEGTYSEPRPIGTRYLTRNL
Spark100-X43:
Spark100-35-cmycNLS (SEQ ID NO: 106)
MAADGYLPDWLEDNLSEGIREWWDLKPGAPKPKAPAAKRVKLDNQQKQDNGRGLVLPGYKYLGP
FNGLDKGEPVNAADAAALEHDKAYDQQLQAGDNPYLRYNHADAEFQERLQEDTSFGGNLGRAVF
QAKKRVLEPLGLVESPVKTAPGKKRPVEPSPQRSPDSSTGIGKKGQQPAKKRLNFGQTGDSESV
PDPQPIGEPPAAPSGVGPNTMAAGGGAPMADNNEGADGVGSSSGNWHCDSTWLGDRVITTSTRT
WALPTYNNHLYKQISNGTSGGSTNDNTYFGYSTPWGYFDFNRFHCHFSPRDWQRLINNNWGFRP
KRLNFKLFNIQVKEVTQNEGTKTIANNLTSTIQVFTDSEYQLPYVLGSAHQGCLPPFPADVFMI
PQYGYLTLNNGSQAVGRSSFYCLEYFPSQMLRTGNNFEFSYNFEDVPFHSSYAHSQSLDRLMNP
LIDQYLYYLSRTQSTGGTAGTQQLLFSQAGPNNMSAQAKNWLPGPCYRQQRVSTTLSQNNNSNF
AWTGATKYHLNGRDSLVNPGVAMATHKDDEERFFPSSGVLMFGKQGAGKDNVDYSSVMLTSEEE
IKTTNPVATEQYGVVADNLQQQNAAPIVGAVNSQGALPGMVWQNRDVYLQGPIWAKIPHTDGNF
HPSPLMGGFGLKHPPPQILIKNTPVPADPPTTFNQAKLASFITQYSTGQVSVEIEWELQKENSK
RWNPEIQYTSNYYKSTNVDFAVNTEGTYSEPRPIGTRYLTRNL
Spark100-X44:
Spark100-33-2xcmycNLS (SEQ ID NO: 107)
MAADGYLPDWLEDNLSEGIREWWDLKPGAPKPPAAKRVKLDEDPAAKRVKLDKANQQKQDNGRG
LVLPGYKYLGPFNGLDKGEPVNAADAAALEHDKAYDQQLQAGDNPYLRYNHADAEFQERLQEDT
SFGGNLGRAVFQAKKRVLEPLGLVESPVKTAPGKKRPVEPSPQRSPDSSTGIGKKGQQPAKKRL
NFGQTGDSESVPDPQPIGEPPAAPSGVGPNTMAAGGGAPMADNNEGADGVGSSSGNWHCDSTWL
GDRVITTSTRTWALPTYNNHLYKQISNGTSGGSTNDNTYFGYSTPWGYFDFNRFHCHFSPRDWQ
RLINNNWGFRPKRLNFKLFNIQVKEVTQNEGTKTIANNLTSTIQVFTDSEYQLPYVLGSAHQGC
LPPFPADVFMIPQYGYLTLNNGSQAVGRSSFYCLEYFPSQMLRTGNNFEFSYNFEDVPFHSSYA
HSQSLDRLMNPLIDQYLYYLSRTQSTGGTAGTQQLLFSQAGPNNMSAQAKNWLPGPCYRQQRVS
TTLSQNNNSNFAWTGATKYHLNGRDSLVNPGVAMATHKDDEERFFPSSGVLMFGKQGAGKDNVD
YSSVMLTSEEEIKTTNPVATEQYGVVADNLQQQNAAPIVGAVNSQGALPGMVWQNRDVYLQGPI
WAKIPHTDGNFHPSPLMGGFGLKHPPPQILIKNTPVPADPPTTFNQAKLASFITQYSTGQVSVE
IEWELQKENSKRWNPEIQYTSNYYKSTNVDFAVNTEGTYSEPRPIGTRYLTRNL
Spark100-X45:
Spark100-35-2xcmycNLS (SEQ ID NO: 108)
MAADGYLPDWLEDNLSEGIREWWDLKPGAPKPKAPAAKRVKLDEDPAAKRVKLDNQQKQDNGRG
LVLPGYKYLGPFNGLDKGEPVNAADAAALEHDKAYDQQLQAGDNPYLRYNHADAEFQERLQEDT
SFGGNLGRAVFQAKKRVLEPLGLVESPVKTAPGKKRPVEPSPQRSPDSSTGIGKKGQQPAKKRL
NFGQTGDSESVPDPQPIGEPPAAPSGVGPNTMAAGGGAPMADNNEGADGVGSSSGNWHCDSTWL
GDRVITTSTRTWALPTYNNHLYKQISNGTSGGSTNDNTYFGYSTPWGYFDFNRFHCHFSPRDWQ
RLINNNWGFRPKRLNFKLFNIQVKEVTQNEGTKTIANNLTSTIQVFTDSEYQLPYVLGSAHQGC
LPPFPADVFMIPQYGYLTLNNGSQAVGRSSFYCLEYFPSQMLRTGNNFEFSYNFEDVPFHSSYA
HSQSLDRLMNPLIDQYLYYLSRTQSTGGTAGTQQLLFSQAGPNNMSAQAKNWLPGPCYRQQRVS
TTLSQNNNSNFAWTGATKYHLNGRDSLVNPGVAMATHKDDEERFFPSSGVLMFGKQGAGKDNVD
YSSVMLTSEEEIKTTNPVATEQYGVVADNLQQQNAAPIVGAVNSQGALPGMVWQNRDVYLQGPI
WAKIPHTDGNFHPSPLMGGFGLKHPPPQILIKNTPVPADPPTTFNQAKLASFITQYSTGQVSVE
IEWELQKENSKRWNPEIQYTSNYYKSTNVDFAVNTEGTYSEPRPIGTRYLTRNL
Spark100-X46:
Spark100-35-3xcmycNLS (SEQ ID NO: 109)
MAADGYLPDWLEDNLSEGIREWWDLKPGAPKPKAPAAKRVKLDEDPAAKRVKLDEDPAAKRVKL
DNQQKQDNGRGLVLPGYKYLGPFNGLDKGEPVNAADAAALEHDKAYDQQLQAGDNPYLRYNHAD
AEFQERLQEDTSFGGNLGRAVFQAKKRVLEPLGLVESPVKTAPGKKRPVEPSPQRSPDSSTGIG
KKGQQPAKKRLNFGQTGDSESVPDPQPIGEPPAAPSGVGPNTMAAGGGAPMADNNEGADGVGSS
SGNWHCDSTWLGDRVITTSTRTWALPTYNNHLYKQISNGTSGGSTNDNTYFGYSTPWGYFDFNR
FHCHFSPRDWQRLINNNWGFRPKRLNFKLFNIQVKEVTQNEGTKTIANNLTSTIQVFTDSEYQL
PYVLGSAHQGCLPPFPADVFMIPQYGYLTLNNGSQAVGRSSFYCLEYFPSQMLRTGNNFEFSYN
FEDVPFHSSYAHSQSLDRLMNPLIDQYLYYLSRTQSTGGTAGTQQLLFSQAGPNNMSAQAKNWL
PGPCYRQQRVSTTLSQNNNSNFAWTGATKYHLNGRDSLVNPGVAMATHKDDEERFFPSSGVLMF
GKQGAGKDNVDYSSVMLTSEEEIKTTNPVATEQYGVVADNLQQQNAAPIVGAVNSQGALPGMVW
QNRDVYLQGPIWAKIPHTDGNFHPSPLMGGFGLKHPPPQILIKNTPVPADPPTTFNQAKLASFI
TQYSTGQVSVEIEWELQKENSKRWNPEIQYTSNYYKSTNVDFAVNTEGTYSEPRPIGTRYLTRN
L
Spark100-X47:
Spark100-35-1xClass3NLS (SEQ ID NO: 110)
MAADGYLPDWLEDNLSEGIREWWDLKPGAPKPKAAAAKRSWSAAFNQQKQDNGRGLVLPGYKYL
GPFNGLDKGEPVNAADAAALEHDKAYDQQLQAGDNPYLRYNHADAEFQERLQEDTSFGGNLGRA
VFQAKKRVLEPLGLVESPVKTAPGKKRPVEPSPQRSPDSSTGIGKKGQQPAKKRLNFGQTGDSE
SVPDPQPIGEPPAAPSGVGPNTMAAGGGAPMADNNEGADGVGSSSGNWHCDSTWLGDRVITTST
RTWALPTYNNHLYKQISNGTSGGSTNDNTYFGYSTPWGYFDFNRFHCHFSPRDWQRLINNNWGF
RPKRLNFKLFNIQVKEVTQNEGTKTIANNLTSTIQVFTDSEYQLPYVLGSAHQGCLPPFPADVF
MIPQYGYLTLNNGSQAVGRSSFYCLEYFPSQMLRTGNNFEFSYNFEDVPFHSSYAHSQSLDRLM
NPLIDQYLYYLSRTQSTGGTAGTQQLLFSQAGPNNMSAQAKNWLPGPCYRQQRVSTTLSQNNNS
NFAWTGATKYHLNGRDSLVNPGVAMATHKDDEERFFPSSGVLMFGKQGAGKDNVDYSSVMLTSE
EEIKTTNPVATEQYGVVADNLQQQNAAPIVGAVNSQGALPGMVWQNRDVYLQGPIWAKIPHTDG
NFHPSPLMGGFGLKHPPPQILIKNTPVPADPPTTFNQAKLASFITQYSTGQVSVEIEWELQKEN
SKRWNPEIQYTSNYYKSTNVDFAVNTEGTYSEPRPIGTRYLTRNL
Spark100-X48:
Spark100-35-2xC1ass3NLS (SEQ ID NO: 111)
MAADGYLPDWLEDNLSEGIREWWDLKPGAPKPKAAAAKRSWSAAFEDAAAKRSWSAAFNQQKQD
NGRGLVLPGYKYLGPFNGLDKGEPVNAADAAALEHDKAYDQQLQAGDNPYLRYNHADAEFQERL
QEDTSFGGNLGRAVFQAKKRVLEPLGLVESPVKTAPGKKRPVEPSPQRSPDSSTGIGKKGQQPA
KKRLNFGQTGDSESVPDPQPIGEPPAAPSGVGPNTMAAGGGAPMADNNEGADGVGSSSGNWHCD
STWLGDRVITTSTRTWALPTYNNHLYKQISNGTSGGSTNDNTYFGYSTPWGYFDFNRFHCHFSP
RDWQRLINNNWGFRPKRLNFKLFNIQVKEVTQNEGTKTIANNLTSTIQVFTDSEYQLPYVLGSA
HQGCLPPFPADVFMIPQYGYLTLNNGSQAVGRSSFYCLEYFPSQMLRTGNNFEFSYNFEDVPFH
SSYAHSQSLDRLMNPLIDQYLYYLSRTQSTGGTAGTQQLLFSQAGPNNMSAQAKNWLPGPCYRQ
QRVSTTLSQNNNSNFAWTGATKYHLNGRDSLVNPGVAMATHKDDEERFFPSSGVLMFGKQGAGK
DNVDYSSVMLTSEEEIKTTNPVATEQYGVVADNLQQQNAAPIVGAVNSQGALPGMVWQNRDVYL
QGPIWAKIPHTDGNFHPSPLMGGFGLKHPPPQILIKNTPVPADPPTTFNQAKLASFITQYSTGQ
VSVEIEWELQKENSKRWNPEIQYTSNYYKSTNVDFAVNTEGTYSEPRPIGTRYLTRNL
Spark100-X49:
Spark100-35-3xC1ass3NLS (SEQ ID NO: 112)
MAADGYLPDWLEDNLSEGIREWWDLKPGAPKPKAAAAKRSWSAAFEDAAAKASWSAAFEDAAAK
RSWSAAFNQQKQDNGRGLVLPGYKYLGPFNGLDKGEPVNAADAAALEHDKAYDQQLQAGDNPYL
RYNHADAEFQERLQEDTSFGGNLGRAVFQAKKRVLEPLGLVESPVKTAPGKKRPVEPSPQRSPD
SSTGIGKKGQQPAKKRLNFGQTGDSESVPDPQPIGEPPAAPSGVGPNTMAAGGGAPMADNNEGA
DGVGSSSGNWHCDSTWLGDRVITTSTRTWALPTYNNHLYKQISNGTSGGSTNDNTYFGYSTPWG
YFDFNRFHCHFSPRDWQRLINNNWGFRPKRLNFKLFNIQVKEVTQNEGTKTIANNLTSTIQVFT
DSEYQLPYVLGSAHQGCLPPFPADVFMIPQYGYLTLNNGSQAVGRSSFYCLEYFPSQMLRTGNN
FEFSYNFEDVPFHSSYAHSQSLDRLMNPLIDQYLYYLSRTQSTGGTAGTQQLLFSQAGPNNMSA
QAKNWLPGPCYRQQRVSTTLSQNNNSNFAWTGATKYHLNGRDSLVNPGVAMATHKDDEERFFPS
SGVLMFGKQGAGKDNVDYSSVMLTSEEEIKTTNPVATEQYGVVADNLQQQNAAPIVGAVNSQGA
LPGMVWQNRDVYLQGPIWAKIPHTDGNFHPSPLMGGFGLKHPPPQILIKNTPVPADPPTTFNQA
KLASFITQYSTGQVSVEIEWELQKENSKRWNPEIQYTSNYYKSTNVDFAVNTEGTYSEPRPIGT
RYLTRNL
Spark100-X50:
Spark100-35-hnRNP_NLS (SEQ ID NO: 113)
MAADGYLPDWLEDNLSEGIREWWDLKPGAPKPKAYGDYSNQQSGYGKVSRRGGHQNSYKPYNQQ
KQDNGRGLVLPGYKYLGPFNGLDKGEPVNAADAAALEHDKAYDQQLQAGDNPYLRYNHADAEFQ
ERLQEDTSFGGNLGRAVFQAKKRVLEPLGLVESPVKTAPGKKRPVEPSPQRSPDSSTGIGKKGQ
QPAKKRLNFGQTGDSESVPDPQPIGEPPAAPSGVGPNTMAAGGGAPMADNNEGADGVGSSSGNW
HCDSTWLGDRVITTSTRTWALPTYNNHLYKQISNGTSGGSTNDNTYFGYSTPWGYFDFNRFHCH
FSPRDWQRLINNNWGFRPKRLNFKLFNIQVKEVTQNEGTKTIANNLTSTIQVFTDSEYQLPYVL
GSAHQGCLPPFPADVFMIPQYGYLTLNNGSQAVGRSSFYCLEYFPSQMLRTGNNFEFSYNFEDV
PFHSSYAHSQSLDRLMNPLIDQYLYYLSRTQSTGGTAGTQQLLFSQAGPNNMSAQAKNWLPGPC
YRQQRVSTTLSQNNNSNFAWTGATKYHLNGRDSLVNPGVAMATHKDDEERFFPSSGVLMFGKQG
AGKDNVDYSSVMLTSEEEIKTTNPVATEQYGVVADNLQQQNAAPIVGAVNSQGALPGMVWQNRD
VYLQGPIWAKIPHTDGNFHPSPLMGGFGLKHPPPQILIKNTPVPADPPTTFNQAKLASFITQYS
TGQVSVEIEWELQKENSKRWNPEIQYTSNYYKSTNVDFAVNTEGTYSEPRPIGTRYLTRNL
Spark100-X51:
Spark100-35-1X-SV40 NLS (SEQ ID NO: 114)
MAADGYLPDWLEDNLSEGIREWWDLKPGAPKPKAPKKKRKVNQQKQDNGRGLVLPGYKYLGPFN
GLDKGEPVNAADAAALEHDKAYDQQLQAGDNPYLRYNHADAEFQERLQEDTSFGGNLGRAVFQA
KKRVLEPLGLVESPVKTAPGKKRPVEPSPQRSPDSSTGIGKKGQQPAKKRLNFGQTGDSESVPD
PQPIGEPPAAPSGVGPNTMAAGGGAPMADNNEGADGVGSSSGNWHCDSTWLGDRVITTSTRTWA
LPTYNNHLYKQISNGTSGGSTNDNTYFGYSTPWGYFDFNRFHCHFSPRDWQRLINNNWGFRPKR
LNFKLFNIQVKEVTQNEGTKTIANNLTSTIQVFTDSEYQLPYVLGSAHQGCLPPFPADVFMIPQ
YGYLTLNNGSQAVGRSSFYCLEYFPSQMLRTGNNFEFSYNFEDVPFHSSYAHSQSLDRLMNPLI
DQYLYYLSRTQSTGGTAGTQQLLFSQAGPNNMSAQAKNWLPGPCYRQQRVSTILSQNNNSNFAW
TGATKYHLNGRDSLVNPGVAMATHKDDEERFFPSSGVLMFGKQGAGKDNVDYSSVMLTSEEEIK
TTNPVATEQYGVVADNLQQQNAAPIVGAVNSQGALPGMVWQNRDVYLQGPIWAKIPHTDGNFHP
SPLMGGFGLKHPPPQILIKNTPVPADPPTTFNQAKLASFITQYSTGQVSVEIEWELQKENSKRW
NPEIQYTSNYYKSTNVDFAVNTEGTYSEPRPIGTRYLTRNL
Spark100-X52: K→Y R mutation
Spark100_K333R (SEQ ID NO: 115)
MAADGYLPDWLEDNLSEGIREWWDLKPGAPKPKANQQKQDNGRGLVLPGYKYLGPFNGLDKGEP
VNAADAAALEHDKAYDQQLQAGDNPYLRYNHADAEFQERLQEDTSFGGNLGRAVFQAKKRVLEP
LGLVESPVKTAPGKKRPVEPSPQRSPDSSTGIGKKGQQPAKKRLNFGQTGDSESVPDPQPIGEP
PAAPSGVGPNTMAAGGGAPMADNNEGADGVGSSSGNWHCDSTWLGDRVITTSTRTWALPTYNNH
LYKQISNGTSGGSTNDNTYFGYSTPWGYFDFNRFHCHFSPRDWQRLINNNWGFRPKRLNFKLFN
IQVKEVTQNEGTRTIANNLTSTIQVFTDSEYQLPYVLGSAHQGCLPPFPADVFMIPQYGYLTLN
NGSQAVGRSSFYCLEYFPSQMLRTGNNFEFSYNFEDVPFHSSYAHSQSLDRLMNPLIDQYLYYL
SRTQSTGGTAGTQQLLFSQAGPNNMSAQAKNWLPGPCYRQQRVSTILSQNNNSNFAWTGATKYH
LNGRDSLVNPGVAMATHKDDEERFFPSSGVLMFGKQGAGKDNVDYSSVMLTSEEEIKTTNPVAT
EQYGVVADNLQQQNAAPIVGAVNSQGALPGMVWQNRDVYLQGPIWAKIPHTDGNFHPSPLMGGF
GLKHPPPQILIKNTPVPADPPTTFNQAKLASFITQYSTGQVSVEIEWELQKENSKRWNPEIQYT
SNYYKSTNVDFAVNTEGTYSEPRPIGTRYLTRNL
Spark100-X53: K→R mutation
Spark100_K530R (SEQ ID NO: 116)
MAADGYLPDWLEDNLSEGIREWWDLKPGAPKPKANQQKQDNGRGLVLPGYKYLGPFNGLDKGEP
VNAADAAALEHDKAYDQQLQAGDNPYLRYNHADAEFQERLQEDTSFGGNLGRAVFQAKKRVLEP
LGLVESPVKTAPGKKRPVEPSPQRSPDSSTGIGKKGQQPAKKRLNFGQTGDSESVPDPQPIGEP
PAAPSGVGPNTMAAGGGAPMADNNEGADGVGSSSGNWHCDSTWLGDRVITTSTRTWALPTYNNH
LYKQISNGTSGGSTNDNTYFGYSTPWGYFDFNRFHCHFSPRDWQRLINNNWGFRPKRLNFKLFN
IQVKEVTQNEGTKTIANNLTSTIQVFTDSEYQLPYVLGSAHQGCLPPFPADVFMIPQYGYLTLN
NGSQAVGRSSFYCLEYFPSQMLRTGNNFEFSYNFEDVPFHSSYAHSQSLDRLMNPLIDQYLYYL
SRTQSTGGTAGTQQLLFSQAGPNNMSAQAKNWLPGPCYRQQRVSTILSQNNNSNFAWTGATKYH
LNGRDSLVNPGVAMATHRDDEERFFPSSGVLMFGKQGAGKDNVDYSSVMLTSEEEIKTTNPVAT
EQYGVVADNLQQQNAAPIVGAVNSQGALPGMVWQNRDVYLQGPIWAKIPHTDGNFHPSPLMGGF
GLKHPPPQILIKNTPVPADPPTTFNQAKLASFITQYSTGQVSVEIEWELQKENSKRWNPEIQYT
SNYYKSTNVDFAVNTEGTYSEPRPIGTRYLTRNL
Spark100-X54:
Spark100_385cmycNLS (SEQ ID NO: 117)
MAADGYLPDWLEDNLSEGIREWWDLKPGAPKPKANQQKQDNGRGLVLPGYKYLGPFNGLDKGEP
VNAADAAALEHDKAYDQQLQAGDNPYLRYNHADAEFQERLQEDTSFGGNLGRAVFQAKKRVLEP
LGLVESPVKTAPGKKRPVEPSPQRSPDSSTGIGKKGQQPAKKRLNFGQTGDSESVPDPQPIGEP
PAAPSGVGPNTMAAGGGAPMADNNEGADGVGSSSGNWHCDSTWLGDRVITTSTRTWALPTYNNH
LYKQISNGTSGGSTNDNTYFGYSTPWGYFDFNRFHCHFSPRDWQRLINNNWGFRPKRLNFKLFN
IQVKEVTQNEGTKTIANNLTSTIQVFTDSEYQLPYVLGSAHQGCLPPFPADVFMIPQYGYLTLN
PAAKRVKLDNGSQAVGRSSFYCLEYFPSQMLRTGNNFEFSYNFEDVPFHSSYAHSQSLDRLMNP
LIDQYLYYLSRTQSTGGTAGTQQLLFSQAGPNNMSAQAKNWLPGPCYRQQRVSTTLSQNNNSNF
AWTGATKYHLNGRDSLVNPGVAMATHKDDEERFFPSSGVLMFGKQGAGKDNVDYSSVMLTSEEE
IKTTNPVATEQYGVVADNLQQQNAAPIVGAVNSQGALPGMVWQNRDVYLQGPIWAKIPHTDGNF
HPSPLMGGFGLKHPPPQILIKNTPVPADPPTTFNQAKLASFITQYSTGQVSVEIEWELQKENSK
RWNPEIQYTSNYYKSTNVDFAVNTEGTYSEPRPIGTRYLTRNL
Spark100-X55:
pSpark100_451cmycNLS (SEQ ID NO: 118)
MAADGYLPDWLEDNLSEGIREWWDLKPGAPKPKANQQKQDNGRGLVLPGYKYLGPFNGLDKGEP
VNAADAAALEHDKAYDQQLQAGDNPYLRYNHADAEFQERLQEDTSFGGNLGRAVFQAKKRVLEP
LGLVESPVKTAPGKKRPVEPSPQRSPDSSTGIGKKGQQPAKKRLNFGQTGDSESVPDPQPIGEP
PAAPSGVGPNTMAAGGGAPMADNNEGADGVGSSSGNWHCDSTWLGDRVITTSTRTWALPTYNNH
LYKQISNGTSGGSTNDNTYFGYSTPWGYFDFNRFHCHFSPRDWQRLINNNWGFRPKRLNFKLFN
IQVKEVTQNEGTKTIANNLTSTIQVFTDSEYQLPYVLGSAHQGCLPPFPADVFMIPQYGYLTLN
NGSQAVGRSSFYCLEYFPSQMLRTGNNFEFSYNFEDVPFHSSYAHSQSLDRLMNPLIDQYLYYL
SRPAAKRVKLDTQSTGGTAGTQQLLFSQAGPNNMSAQAKNWLPGPCYRQQRVSTTLSQNNNSNF
AWTGATKYHLNGRDSLVNPGVAMATHKDDEERFFPSSGVLMFGKQGAGKDNVDYSSVMLTSEEE
IKTTNPVATEQYGVVADNLQQQNAAPIVGAVNSQGALPGMVWQNRDVYLQGPIWAKIPHTDGNF
HPSPLMGGFGLKHPPPQILIKNTPVPADPPTTFNQAKLASFITQYSTGQVSVEIEWELQKENSK
RWNPEIQYTSNYYKSTNVDFAVNTEGTYSEPRPIGTRYLTRNL
Spark100-X56:
pSpark100_457cmycNLS (SEQ ID NO: 119)
MAADGYLPDWLEDNLSEGIREWWDLKPGAPKPKANQQKQDNGRGLVLPGYKYLGPFNGLDKGEP
VNAADAAALEHDKAYDQQLQAGDNPYLRYNHADAEFQERLQEDTSFGGNLGRAVFQAKKRVLEP
LGLVESPVKTAPGKKRPVEPSPQRSPDSSTGIGKKGQQPAKKRLNFGQTGDSESVPDPQPIGEP
PAAPSGVGPNTMAAGGGAPMADNNEGADGVGSSSGNWHCDSTWLGDRVITTSTRTWALPTYNNH
LYKQISNGTSGGSTNDNTYFGYSTPWGYFDFNRFHCHFSPRDWQRLINNNWGFRPKRLNFKLFN
IQVKEVTQNEGTKTIANNLTSTIQVFTDSEYQLPYVLGSAHQGCLPPFPADVFMIPQYGYLTLN
NGSQAVGRSSFYCLEYFPSQMLRTGNNFEFSYNFEDVPFHSSYAHSQSLDRLMNPLIDQYLYYL
SRTQSTGGPAAKRVKLDTAGTQQLLFSQAGPNNMSAQAKNWLPGPCYRQQRVSTILSQNNNSNF
AWTGATKYHLNGRDSLVNPGVAMATHKDDEERFFPSSGVLMFGKQGAGKDNVDYSSVMLTSEEE
IKTTNPVATEQYGVVADNLQQQNAAPIVGAVNSQGALPGMVWQNRDVYLQGPIWAKIPHTDGNF
HPSPLMGGFGLKHPPPQILIKNTPVPADPPTTFNQAKLASFITQYSTGQVSVEIEWELQKENSK
RWNPEIQYTSNYYKSTNVDFAVNTEGTYSEPRPIGTRYLTRNL
Spark100-X57:
pSpark100-589_cmycNLS (SEQ ID NO: 120)
MAADGYLPDWLEDNLSEGIREWWDLKPGAPKPKANQQKQDNGRGLVLPGYKYLGPFNGLDKGEP
VNAADAAALEHDKAYDQQLQAGDNPYLRYNHADAEFQERLQEDTSFGGNLGRAVFQAKKRVLEP
LGLVESPVKTAPGKKRPVEPSPQRSPDSSTGIGKKGQQPAKKRLNFGQTGDSESVPDPQPIGEP
PAAPSGVGPNTMAAGGGAPMADNNEGADGVGSSSGNWHCDSTWLGDRVITTSTRTWALPTYNNH
LYKQISNGTSGGSTNDNTYFGYSTPWGYFDFNRFHCHFSPRDWQRLINNNWGFRPKRLNFKLFN
IQVKEVTQNEGTKTIANNLTSTIQVFTDSEYQLPYVLGSAHQGCLPPFPADVFMIPQYGYLTLN
NGSQAVGRSSFYCLEYFPSQMLRTGNNFEFSYNFEDVPFHSSYAHSQSLDRLMNPLIDQYLYYL
SRTQSTGGTAGTQQLLFSQAGPNNMSAQAKNWLPGPCYRQQRVSTTLSQNNNSNFAWTGATKYH
LNGRDSLVNPGVAMATHKDDEERFFPSSGVLMFGKQGAGKDNVDYSSVMLTSEEEIKTTNPVAT
EQYGVVADNLQQPAAKRVKLDQNAAPIVGAVNSQGALPGMVWQNRDVYLQGPIWAKIPHTDGNF
HPSPLMGGFGLKHPPPQILIKNTPVPADPPTTFNQAKLASFITQYSTGQVSVEIEWELQKENSK
RWNPEIQYTSNYYKSTNVDFAVNTEGTYSEPRPIGTRYLTRNL
Spark100-X58:
pSpark100-591_cmycNLS (SEQ ID NO: 121)
MAADGYLPDWLEDNLSEGIREWWDLKPGAPKPKANQQKQDNGRGLVLPGYKYLGPFNGLDKGEP
VNAADAAALEHDKAYDQQLQAGDNPYLRYNHADAEFQERLQEDTSFGGNLGRAVFQAKKRVLEP
LGLVESPVKTAPGKKRPVEPSPQRSPDSSTGIGKKGQQPAKKRLNFGQTGDSESVPDPQPIGEP
PAAPSGVGPNTMAAGGGAPMADNNEGADGVGSSSGNWHCDSTWLGDRVITTSTRTWALPTYNNH
LYKQISNGTSGGSTNDNTYFGYSTPWGYFDFNRFHCHFSPRDWQRLINNNWGFRPKRLNFKLFN
IQVKEVTQNEGTKTIANNLTSTIQVFTDSEYQLPYVLGSAHQGCLPPFPADVFMIPQYGYLTLN
NGSQAVGRSSFYCLEYFPSQMLRTGNNFEFSYNFEDVPFHSSYAHSQSLDRLMNPLIDQYLYYL
SRTQSTGGTAGTQQLLFSQAGPNNMSAQAKNWLPGPCYRQQRVSTILSQNNNSNFAWTGATKYH
LNGRDSLVNPGVAMATHKDDEERFFPSSGVLMFGKQGAGKDNVDYSSVMLTSEEEIKTTNPVAT
EQYGVVADNLQQQNPAAKRVKLDAAPIVGAVNSQGALPGMVWQNRDVYLQGPIWAKIPHTDGNF
HPSPLMGGFGLKHPPPQILIKNTPVPADPPTTFNQAKLASFITQYSTGQVSVEIEWELQKENSK
RWNPEIQYTSNYYKSTNVDFAVNTEGTYSEPRPIGTRYLTRNL

### Example 8

AAV2 VP1
(SEQ ID NO: 122)
[sequence omitted]
FVIII-BDD, showing the SQ sequence underlined
(SEQ ID NO: 123)
MQIELSTCFFLCLLRFCFSATRRYYLGAVELSWDYMQSDLGELPVDARFP
PRVPKSFPFNTSVVYKKTLFVEFTDHLFNIAKPRPPWMGLLGPTIQAEVY
DTVVITLKNMASHPVSLHAVGVSYWKASEGAEYDDQTSQREKEDDKVFPG
GSHTYVWQVLKENGPMASDPLCLTYSYLSHVDLVKDLNSGLIGALLVCRE
GSLAKEKTQTLHKFILLFAVFDEGKSWHSETKNSLMQDRDAASARAWPKM
HTVNGYVNRSLPGLIGCHRKSVYWHVIGMGTTPEVHSIFLEGHTFLVRNH
RQASLEISPITFLTAQTLLMDLGQFLLFCHISSHQHDGMEAYVKVDSCPE
EPQLRMKNNEEAEDYDDDLTDSEMDVVRFDDDNSPSFIQIRSVAKKHPKT
WVHYIAAEEEDWDYAPLVLAPDDRSYKSQYLNNGPQRIGRKYKKVRFMAY
TDETFKTREAIQHESGILGPLLYGEVGDTLLIIFKNQASRPYNIYPHGIT
DVRPLYSRRLPKGVKHLKDFPILPGEIFKYKWTVTVEDGPTKSDPRCLTR
YYSSFVNMERDLASGLIGPLLICYKESVDQRGNQIMSDKRNVILFSVFDE
NRSWYLTENIQRFLPNPAGVQLEDPEFQASNIMHSINGYVFDSLQLSVCL
HEVAYWYILSIGAQTDFLSVFFSGYTFKHKMVYEDTLTLFPFSGETVFMS
MENPGLWILGCHNSDFRNRGMTALLKVSSCDKNTGDYYEDSYEDISAYLL
SKNNAIEPRSFSQNPPVLKRHQREITRTTLQSDQEEIDYDDTISVEMKKE
DFDIYDEDENQSPRSFQKKTRHYFIAAVERLWDYGMSSSPHVLRNRAQSG
SVPQFKKVVFQEFTDGSFTQPLYRGELNEHLGLLGPYIRAEVEDNIMVTF
RNQASRPYSFYSSLISYEEDQRQGAEPRKNFVKPNETKTYFWKVQHHMAP
TKDEFDCKAWAYFSDVDLEKDVHSGLIGPLLVCHTNTLNPAHGRQVTVQE
FALFFTIFDETKSWYFTENMERNCRAPCNIQMEDPTFKENYRFHAINGYI
MDTLPGLVMAQDQRIRWYLLSMGSNENIHSIHFSGHVFTVRKKEEYKMAL
YNLYPGVFETVEMLPSKAGIWRVECLIGEHLHAGMSTLFLVYSNKCQTPL
GMASGHIRDFQITASGQYGQWAPKLARLHYSGSINAWSTKEPFSWIKVDL
LAPMIIHGIKTQGARQKFSSLYISQFIIMYSLDGKKWQTYRGNSTGTLMV
FFGNVDSSGIKHNIFNPPIIARYIRLHPTHYSIRSTLRMELMGCDLNSCS
MPLGMESKAISDAQITASSYFTNMFATWSPSKARLHLQGRSNAWRPQVNN
PKEWLQVDFQKTMKVTGVTTQGVKSLLTSMYVKEFLISSSQDGHQWTLFF
QNGKVKVFQGNQDSFTPVVNSLDPPLLTRYLRIHPQSWVHQIALRMEVLG
CEAQDLY
SQ sequence
(SEQ ID NO: 124)
SFSQNPPVLKRHQR
Transthyretin (TTR) promoter
(SEQ ID NO: 125)
GTCTGTCTGCACATTTCGTAGAGCGAGTGTTCCGATACTCTAATCTCCCT
AGGCAAGGTTCATATTTGTGTAGGTTACTTATTCTCCTTTTGTTGACTAA
GTCAATAATCAGAATCAGCAGGTTTGGAGTCAGCTTGGCAGGGATCAGCA
GCCTGGGTTGGAAGGAGGGGGTATAAAAGCCCCTTCACCAGGAGAAGCCG
TCACACAGATCCACAAGCTCCT
Mutant transthyretin (TTRmut) promoter
(SEQ ID NO: 126)
GTCTGTCTGCACATTTCGTAGAGCGAGTGTTCCGATACTCTAATCTCCCT
AGGCAAGGTTCATATTGACTTAGGTTACTTATTCTCCTTTTGTTGACTAA
GTCAATAATCAGAATCAGCAGGTTTGGAGTCAGCTTGGCAGGGATCAGCA
GCCTGGGTTGGAAGGAGGGGGTATAAAAGCCCCTTCACCAGGAGAAGCCG

The application's sequence listing, which the Patent Office published only in electronic form, follows.

SEQUENCE LISTING (141 sequences)

SEQ ID NO: 1 - protein, 736 aa, Artificial Sequence
  Viral Peptide
MAADGYLPDWLEDNLSEGIREWWALQPGAPKPKANQQHQDNARGLVLPGYKYLGPGNGLDKGEPVNAADAAALEHDKAYDQQLKAGDNPYLKYNHADAEFQERLKEDTSFGGNLGRAVFQAKKRLLEPLGLVEEAAKTAPGKKRPVDQSPQEPDSSSGVGKSGKQPARKRLNFGQTGDSESVPDPQPLGEPPAAPTSLGSNTMASGGGAPMADNNEGADGVGNSSGNWHCDSQWLGDRVITTSTRTWALPTYNNHLYKQISSQSGASNDNHYFGYSTPWGYFDFNRFHCHFSPRDWQRLINNNWGFRPKKLSFKLFNIQVKEVTQNDGTTTIANNLTSTVQVFTDSEYQLPYVLGSAHQGCLPPFPADVFMVPQYGYLTLNNGSQAVGRSSFYCLEYFPSQMLRTGNNFQFSYTFEDVPFHSSYAHSQSLDRLMNPLIDQYLYYLNRTQGTTSGTTNQSRLLFSQAGPQSMSLQARNWLPGPCYRQQRLSKTANDNNNSNFPWTAASKYHLNGRDSLVNPGPAMASHKDDEEKFFPMHGNLIFGKEGTTASNAELDNVMITDEEEIRTTNPVATEQYGTVANNLQSSNTAPTTRTVNDQGALPGMVWQDRDVYLQGPIWAKIPHTDGHFHPSPLMGGFGLKHPPPQIMIKNTPVPANPPTTFSPAKFASFITQYSTGQVSVEIEWELQKENSKRWNPEIQYTSNYNKSVNVDFTVDTNGVYSEPRPIGTRYLTRPL

SEQ ID NO: 2 - protein, 736 aa, Artificial Sequence
  Viral Peptide
MAADGYLPDWLEDNLSEGIREWWALQPGAPKPKANQQHQDNARGLVLPGYKYLGPGNGLDKGEPVNAADAAALEHDKAYDQQLKAGDNPYLKYNHADAEFQERLKEDTSFGGNLGRAVFQAKKRLLEPLGLVEEAARTAPGKKRPVDQSPQEPDSSSGVGKSGKQPARKRLNFGQTGDSESVPDPQPLGEPPAAPTSLGSNTMASGGGAPMADNNEGADGVGNSSGNWHCDSQWLGDRVITTSTRTWALPTYNNHLYKQISSQSGASNDNHYFGYSTPWGYFDFNRFHCHFSPRDWQRLINNNWGFRPKKLSFKLFNIQVKEVTQNDGTTTIANNLTSTVQVFTDSEYQLPYVLGSAHQGCLPPFPADVFMVPQYGYLTLNNGSQAVGRSSFYCLEYFPSQMLRTGNNFQFSYTFEDVPFHSSYAHSQSLDRLMNPLIDQYLYYLNRTQGTTSGTTNQSRLLFSQAGPQSMSLQARNWLPGPCYRQQRLSKTANDNNNSNFPWTAASKYHLNGRDSLVNPGPAMASHKDDEEKFFPMHGNLIFGKEGTTASNAELDNVMITDEEEIRTTNPVATEQYGTVANNLQSSNTAPTTRTVNDQGALPGMVWQDRDVYLQGPIWAKIPHTDGHFHPSPLMGGFGLKHPPPQIMIKNTPVPANPPTTFSPAKFASFITQYSTGQVSVEIEWELQKENSKRWNPEIQYTSNYNKSVNVDFTVDTNGVYSEPRPIGTRYLTRPL

SEQ ID NO: 3 - protein, 736 aa, Artificial Sequence
  Viral Peptide
MAADGYLPDWLEDNLSEGIREWWALQPGAPKPKANQQHQDNARGLVLPGYKYLGPGNGLDKGEPVNAADAAALEHDKAYDQQLKAGDNPYLKYNHADAEFQERLKEDTSFGGNLGRAVFQAKKRLLEPLGLVEEAAKTAPGKKRPVDQSPQEPDSSSGVGKSGKQPARKRLNFGQTGDSESVPDPQPLGEPPAAPTSLGSNTMASGGGAPMADNNEGADGVGNSSGNWHCDSQWLGDRVITTSTRTWALPTYNNHLYKQISSQSGASNDNHYFGYSTPWGYFDFNRFHCHFSPRDWQRLINNNWGFRPKKLSFKLFNIQVKEVTQNDGTTTIANNLTSTVQVFTDSEYQLPYVLGSAHQGCLPPFPADVFMVPQYGYLTLNNGSQAVGRSSFYCLEYFPSQMLRTGNNFQFSYTFEDVPFHSSYAHSQSLDRLMNPLIDQYLYYLNRTQGTTSGTTNQSRLLFSQAGPQSMSLQARNWLPGPCYRQQRLSKTANDNNNSNFPWTAASKYHLNGRDSLVNPGPAMASHRDDEEKFFPMHGNLIFGKEGTTASNAELDNVMITDEEEIRTTNPVATEQYGTVANNLQSSNTAPTTRTVNDQGALPGMVWQDRDVYLQGPIWAKIPHTDGHFHPSPLMGGFGLKHPPPQIMIKNTPVPANPPTTFSPAKFASFITQYSTGQVSVEIEWELQKENSKRWNPEIQYTSNYNKSVNVDFTVDTNGVYSEPRPIGTRYLTRPL

SEQ ID NO: 4 - protein, 736 aa, Artificial Sequence
  Viral Peptide
MAADGYLPDWLEDNLSEGIREWWALQPGAPKPKANQQHQDNARGLVLPGYKYLGPGNGLDKGEPVNAADAAALEHDKAYDQQLKAGDNPYLKYNHADAEFQERLKEDTSFGGNLGRAVFQAKKRLLEPLGLVEEAAKTAPGKKRPVDQSPQEPDSSSGVGKSGKQPARKRLNFGQTGDSESVPDPQPLGEPPAAPTSLGSNTMASGGGAPMADNNEGADGVGNSSGNWHCDSQWLGDRVITTSTRTWALPTYNNHLYKQISSQSGASNDNHYFGYSTPWGYFDFNRFHCHFSPRDWQRLINNNWGFRPKKLSFKLFNIQVKEVTQNDGTTTIANNLTSTVQVFTDSEYQLPYVLGSAHQGCLPPFPADVFMVPQYGYLTLNNGSQAVGRSSFYCLEYFPSQMLRTGNNFQFSYTFEDVPFHSSYAHSQSLDRLMNPLIDQYLYYLNRTQGTTSGTTNQSRLLFSQAGPQSMSLQARNWLPGPCYRQQRLSKTANDNNNSNFPWTAASKYHLNGRDSLVNPGPAMASHKDDEERFFPMHGNLIFGKEGTTASNAELDNVMITDEEEIRTTNPVATEQYGTVANNLQSSNTAPTTRTVNDQGALPGMVWQDRDVYLQGPIWAKIPHTDGHFHPSPLMGGFGLKHPPPQIMIKNTPVPANPPTTFSPAKFASFITQYSTGQVSVEIEWELQKENSKRWNPEIQYTSNYNKSVNVDFTVDTNGVYSEPRPIGTRYLTRPL

SEQ ID NO: 5 - protein, 736 aa, Artificial Sequence
  Viral Peptide
MAADGYLPDWLEDNLSEGIREWWALQPGAPKPKANQQHQDNARGLVLPGYKYLGPGNGLDKGEPVNAADAAALEHDKAYDQQLKAGDNPYLKYNHADAEFQERLKEDTSFGGNLGRAVFQAKKRLLEPLGLVEEAAKTAPGKKRPVDQSPQEPDSSSGVGKSGKQPARKRLNFGQTGDSESVPDPQPLGEPPAAPTSLGSNTMASGGGAPMADNNEGADGVGNSSGNWHCDSQWLGDRVITTSTRTWALPTYNNHLYKQISSQSGASNDNHYFGYSTPWGYFDFNRFHCHFSPRDWQRLINNNWGFRPKKLSFKLFNIQVKEVTQNDGTTTIANNLTSTVQVFTDSEYQLPYVLGSAHQGCLPPFPADVFMVPQYGYLTLNNGSQAVGRSSFYCLEYFPSQMLRTGNNFQFSYTFEDVPFHSSYAHSQSLDRLMNPLIDQYLYYLNRTQGTTSGTTNQSRLLFSQAGPQSMSLQARNWLPGPCYRQQRLSKTANDNNNSNFPWTAASKYHLNGRDSLVNPGPAMASHKDDEEKFFPMHGNLIFGREGTTASNAELDNVMITDEEEIRTTNPVATEQYGTVANNLQSSNTAPTTRTVNDQGALPGMVWQDRDVYLQGPIWAKIPHTDGHFHPSPLMGGFGLKHPPPQIMIKNTPVPANPPTTFSPAKFASFITQYSTGQVSVEIEWELQKENSKRWNPEIQYTSNYNKSVNVDFTVDTNGVYSEPRPIGTRYLTRPL

SEQ ID NO: 6 - protein, 736 aa, Artificial Sequence
  Viral Peptide
MAADGYLPDWLEDNLSEGIREWWALQPGAPKPKANQQHQDNARGLVLPGYKYLGPGNGLDKGEPVNAADAAALEHDKAYDQQLKAGDNPYLKYNHADAEFQERLKEDTSFGGNLGRAVFQAKKRLLEPLGLVEEAAKTAPGKKRPVDQSPQEPDSSSGVGKSGKQPARKRLNFGQTGDSESVPDPQPLGEPPAAPTSLGSNTMASGGGAPMADNNEGADGVGNSSGNWHCDSQWLGDRVITTSTRTWALPTYNNHLYKQISSQSGASNDNHYFGYSTPWGYFDFNRFHCHFSPRDWQRLINNNWGFRPKKLSFKLFNIQVKEVTQNDGTTTIANNLTSTVQVFTDSEYQLPYVLGSAHQGCLPPFPADVFMVPQYGYLTLNNGSQAVGRSSFYCLEYFPSQMLRTGNNFQFSYTFEDVPFHSSYAHSQSLDRLMNPLIDQYLYYLNRTQGTTSGTTNQSRLLFSQAGPQSMSLQARNWLPGPCYRQQRLSKTANDNNNSNFPWTAASKYHLNGRDSLVNPGPAMASHRDDEERFFPMHGNLIFGKEGTTASNAELDNVMITDEEEIRTTNPVATEQYGTVANNLQSSNTAPTTRTVNDQGALPGMVWQDRDVYLQGPIWAKIPHTDGHFHPSPLMGGFGLKHPPPQIMIKNTPVPANPPTTFSPAKFASFITQYSTGQVSVEIEWELQKENSKRWNPEIQYTSNYNKSVNVDFTVDTNGVYSEPRPIGTRYLTRPL

SEQ ID NO: 7 - protein, 736 aa, Artificial Sequence
  Viral Peptide
MAADGYLPDWLEDNLSEGIREWWALQPGAPKPKANQQHQDNARGLVLPGYKYLGPGNGLDKGEPVNAADAAALEHDKAYDQQLKAGDNPYLKYNHADAEFQERLKEDTSFGGNLGRAVFQAKKRLLEPLGLVEEAARTAPGKKRPVDQSPQEPDSSSGVGKSGKQPARKRLNFGQTGDSESVPDPQPLGEPPAAPTSLGSNTMASGGGAPMADNNEGADGVGNSSGNWHCDSQWLGDRVITTSTRTWALPTYNNHLYKQISSQSGASNDNHYFGYSTPWGYFDFNRFHCHFSPRDWQRLINNNWGFRPKKLSFKLFNIQVKEVTQNDGTTTIANNLTSTVQVFTDSEYQLPYVLGSAHQGCLPPFPADVFMVPQYGYLTLNNGSQAVGRSSFYCLEYFPSQMLRTGNNFQFSYTFEDVPFHSSYAHSQSLDRLMNPLIDQYLYYLNRTQGTTSGTTNQSRLLFSQAGPQSMSLQARNWLPGPCYRQQRLSKTANDNNNSNFPWTAASKYHLNGRDSLVNPGPAMASHRDDEEKFFPMHGNLIFGKEGTTASNAELDNVMITDEEEIRTTNPVATEQYGTVANNLQSSNTAPTTRTVNDQGALPGMVWQDRDVYLQGPIWAKIPHTDGHFHPSPLMGGFGLKHPPPQIMIKNTPVPANPPTTFSPAKFASFITQYSTGQVSVEIEWELQKENSKRWNPEIQYTSNYNKSVNVDFTVDTNGVYSEPRPIGTRYLTRPL

SEQ ID NO: 8 - protein, 736 aa, Artificial Sequence
  Viral Peptide
MAADGYLPDWLEDNLSEGIREWWALQPGAPKPKANQQHQDNARGLVLPGYKYLGPGNGLDKGEPVNAADAAALEHDKAYDQQLKAGDNPYLKYNHADAEFQERLKEDTSFGGNLGRAVFQAKKRLLEPLGLVEEAARTAPGKKRPVDQSPQEPDSSSGVGKSGKQPARKRLNFGQTGDSESVPDPQPLGEPPAAPTSLGSNTMASGGGAPMADNNEGADGVGNSSGNWHCDSQWLGDRVITTSTRTWALPTYNNHLYKQISSQSGASNDNHYFGYSTPWGYFDFNRFHCHFSPRDWQRLINNNWGFRPKKLSFKLFNIQVKEVTQNDGTTTIANNLTSTVQVFTDSEYQLPYVLGSAHQGCLPPFPADVFMVPQYGYLTLNNGSQAVGRSSFYCLEYFPSQMLRTGNNFQFSYTFEDVPFHSSYAHSQSLDRLMNPLIDQYLYYLNRTQGTTSGTTNQSRLLFSQAGPQSMSLQARNWLPGPCYRQQRLSKTANDNNNSNFPWTAASKYHLNGRDSLVNPGPAMASHKDDEERFFPMHGNLIFGKEGTTASNAELDNVMITDEEEIRTTNPVATEQYGTVANNLQSSNTAPTTRTVNDQGALPGMVWQDRDVYLQGPIWAKIPHTDGHFHPSPLMGGFGLKHPPPQIMIKNTPVPANPPTTFSPAKFASFITQYSTGQVSVEIEWELQKENSKRWNPEIQYTSNYNKSVNVDFTVDTNGVYSEPRPIGTRYLTRPL

SEQ ID NO: 9 - protein, 736 aa, Artificial Sequence
  Viral Peptide
MAADGYLPDWLEDNLSEGIREWWALQPGAPKPKANQQHQDNARGLVLPGYKYLGPGNGLDKGEPVNAADAAALEHDKAYDQQLKAGDNPYLKYNHADAEFQERLKEDTSFGGNLGRAVFQAKKRLLEPLGLVEEAARTAPGKKRPVDQSPQEPDSSSGVGKSGKQPARKRLNFGQTGDSESVPDPQPLGEPPAAPTSLGSNTMASGGGAPMADNNEGADGVGNSSGNWHCDSQWLGDRVITTSTRTWALPTYNNHLYKQISSQSGASNDNHYFGYSTPWGYFDFNRFHCHFSPRDWQRLINNNWGFRPKKLSFKLFNIQVKEVTQNDGTTTIANNLTSTVQVFTDSEYQLPYVLGSAHQGCLPPFPADVFMVPQYGYLTLNNGSQAVGRSSFYCLEYFPSQMLRTGNNFQFSYTFEDVPFHSSYAHSQSLDRLMNPLIDQYLYYLNRTQGTTSGTTNQSRLLFSQAGPQSMSLQARNWLPGPCYRQQRLSKTANDNNNSNFPWTAASKYHLNGRDSLVNPGPAMASHKDDEEKFFPMHGNLIFGREGTTASNAELDNVMITDEEEIRTTNPVATEQYGTVANNLQSSNTAPTTRTVNDQGALPGMVWQDRDVYLQGPIWAKIPHTDGHFHPSPLMGGFGLKHPPPQIMIKNTPVPANPPTTFSPAKFASFITQYSTGQVSVEIEWELQKENSKRWNPEIQYTSNYNKSVNVDFTVDTNGVYSEPRPIGTRYLTRPL

SEQ ID NO: 10 - protein, 736 aa, Artificial Sequence
  Viral Peptide
MAADGYLPDWLEDNLSEGIREWWALQPGAPKPKANQQHQDNARGLVLPGYKYLGPGNGLDKGEPVNAADAAALEHDKAYDQQLKAGDNPYLKYNHADAEFQERLKEDTSFGGNLGRAVFQAKKRLLEPLGLVEEAARTAPGKKRPVDQSPQEPDSSSGVGKSGKQPARKRLNFGQTGDSESVPDPQPLGEPPAAPTSLGSNTMASGGGAPMADNNEGADGVGNSSGNWHCDSQWLGDRVITTSTRTWALPTYNNHLYKQISSQSGASNDNHYFGYSTPWGYFDFNRFHCHFSPRDWQRLINNNWGFRPKKLSFKLFNIQVKEVTQNDGTTTIANNLTSTVQVFTDSEYQLPYVLGSAHQGCLPPFPADVFMVPQYGYLTLNNGSQAVGRSSFYCLEYFPSQMLRTGNNFQFSYTFEDVPFHSSYAHSQSLDRLMNPLIDQYLYYLNRTQGTTSGTTNQSRLLFSQAGPQSMSLQARNWLPGPCYRQQRLSKTANDNNNSNFPWTAASKYHLNGRDSLVNPGPAMASHRDDEERFFPMHGNLIFGKEGTTASNAELDNVMITDEEEIRTTNPVATEQYGTVANNLQSSNTAPTTRTVNDQGALPGMVWQDRDVYLQGPIWAKIPHTDGHFHPSPLMGGFGLKHPPPQIMIKNTPVPANPPTTFSPAKFASFITQYSTGQVSVEIEWELQKENSKRWNPEIQYTSNYNKSVNVDFTVDTNGVYSEPRPIGTRYLTRPL

SEQ ID NO: 11 - protein, 745 aa, Artificial Sequence
  NLS Peptide
MAADGYLPDWLEDNLSEGIREWWALQPGAPKPKAPAAKRVKLDNQQHQDNARGLVLPGYKYLGPGNGLDKGEPVNAADAAALEHDKAYDQQLKAGDNPYLKYNHADAEFQERLKEDTSFGGNLGRAVFQAKKRLLEPLGLVEEAAKTAPGKKRPVDQSPQEPDSSSGVGKSGKQPARKRLNFGQTGDSESVPDPQPLGEPPAAPTSLGSNTMASGGGAPMADNNEGADGVGNSSGNWHCDSQWLGDRVITTSTRTWALPTYNNHLYKQISSQSGASNDNHYFGYSTPWGYFDFNRFHCHFSPRDWQRLINNNWGFRPKKLSFKLFNIQVKEVTQNDGTTTIANNLTSTVQVFTDSEYQLPYVLGSAHQGCLPPFPADVFMVPQYGYLTLNNGSQAVGRSSFYCLEYFPSQMLRTGNNFQFSYTFEDVPFHSSYAHSQSLDRLMNPLIDQYLYYLNRTQGTTSGTTNQSRLLFSQAGPQSMSLQARNWLPGPCYRQQRLSKTANDNNNSNFPWTAASKYHLNGRDSLVNPGPAMASHKDDEEKFFPMHGNLIFGKEGTTASNAELDNVMITDEEEIRTTNPVATEQYGTVANNLQSSNTAPTTRTVNDQGALPGMVWQDRDVYLQGPIWAKIPHTDGHFHPSPLMGGFGLKHPPPQIMIKNTPVPANPPTTFSPAKFASFITQYSTGQVSVEIEWELQKENSKRWNPEIQYTSNYNKSVNVDFTVDTNGVYSEPRPIGTRYLTRPL

SEQ ID NO: 12 - protein, 745 aa, Artificial Sequence
  Viral Peptide
MAADGYLPDWLEDNLSEGIREWWALQPGAPKPKAPAARRVRLDNQQHQDNARGLVLPGYKYLGPGNGLDKGEPVNAADAAALEHDKAYDQQLKAGDNPYLKYNHADAEFQERLKEDTSFGGNLGRAVFQAKKRLLEPLGLVEEAAKTAPGKKRPVDQSPQEPDSSSGVGKSGKQPARKRLNFGQTGDSESVPDPQPLGEPPAAPTSLGSNTMASGGGAPMADNNEGADGVGNSSGNWHCDSQWLGDRVITTSTRTWALPTYNNHLYKQISSQSGASNDNHYFGYSTPWGYFDFNRFHCHFSPRDWQRLINNNWGFRPKKLSFKLFNIQVKEVTQNDGTTTIANNLTSTVQVFTDSEYQLPYVLGSAHQGCLPPFPADVFMVPQYGYLTLNNGSQAVGRSSFYCLEYFPSQMLRTGNNFQFSYTFEDVPFHSSYAHSQSLDRLMNPLIDQYLYYLNRTQGTTSGTTNQSRLLFSQAGPQSMSLQARNWLPGPCYRQQRLSKTANDNNNSNFPWTAASKYHLNGRDSLVNPGPAMASHKDDEEKFFPMHGNLIFGKEGTTASNAELDNVMITDEEEIRTTNPVATEQYGTVANNLQSSNTAPTTRTVNDQGALPGMVWQDRDVYLQGPIWAKIPHTDGHFHPSPLMGGFGLKHPPPQIMIKNTPVPANPPTTFSPAKFASFITQYSTGQVSVEIEWELQKENSKRWNPEIQYTSNYNKSVNVDFTVDTNGVYSEPRPIGTRYLTRPL

SEQ ID NO: 13 - protein, 763 aa, Artificial Sequence
  Viral Peptide
MAADGYLPDWLEDNLSEGIREWWALQPGAPKPKAFGNYNNQSSNFGPLRGGNFGGRSSGPYNQQHQDNARGLVLPGYKYLGPGNGLDKGEPVNAADAAALEHDKAYDQQLKAGDNPYLKYNHADAEFQERLKEDTSFGGNLGRAVFQAKKRLLEPLGLVEEAAKTAPGKKRPVDQSPQEPDSSSGVGKSGKQPARKRLNFGQTGDSESVPDPQPLGEPPAAPTSLGSNTMASGGGAPMADNNEGADGVGNSSGNWHCDSQWLGDRVITTSTRTWALPTYNNHLYKQISSQSGASNDNHYFGYSTPWGYFDFNRFHCHFSPRDWQRLINNNWGFRPKKLSFKLFNIQVKEVTQNDGTTTIANNLTSTVQVFTDSEYQLPYVLGSAHQGCLPPFPADVFMVPQYGYLTLNNGSQAVGRSSFYCLEYFPSQMLRTGNNFQFSYTFEDVPFHSSYAHSQSLDRLMNPLIDQYLYYLNRTQGTTSGTTNQSRLLFSQAGPQSMSLQARNWLPGPCYRQQRLSKTANDNNNSNFPWTAASKYHLNGRDSLVNPGPAMASHKDDEEKFFPMHGNLIFGKEGTTASNAELDNVMITDEEEIRTTNPVATEQYGTVANNLQSSNTAPTTRTVNDQGALPGMVWQDRDVYLQGPIWAKIPHTDGHFHPSPLMGGFGLKHPPPQIMIKNTPVPANPPTTFSPAKFASFITQYSTGQVSVEIEWELQKENSKRWNPEIQYTSNYNKSVNVDFTVDTNGVYSEPRPIGTRYLTRPL

SEQ ID NO: 14 - protein, 763 aa, Artificial Sequence
  Viral Peptide
MAADGYLPDWLEDNLSEGIREWWALQPGAPKPFGNYNNQSSNFGPLRGGNFGGRSSGPYKANQQHQDNARGLVLPGYKYLGPGNGLDKGEPVNAADAAALEHDKAYDQQLKAGDNPYLKYNHADAEFQERLKEDTSFGGNLGRAVFQAKKRLLEPLGLVEEAAKTAPGKKRPVDQSPQEPDSSSGVGKSGKQPARKRLNFGQTGDSESVPDPQPLGEPPAAPTSLGSNTMASGGGAPMADNNEGADGVGNSSGNWHCDSQWLGDRVITTSTRTWALPTYNNHLYKQISSQSGASNDNHYFGYSTPWGYFDFNRFHCHFSPRDWQRLINNNWGFRPKKLSFKLFNIQVKEVTQNDGTTTIANNLTSTVQVFTDSEYQLPYVLGSAHQGCLPPFPADVFMVPQYGYLTLNNGSQAVGRSSFYCLEYFPSQMLRTGNNFQFSYTFEDVPFHSSYAHSQSLDRLMNPLIDQYLYYLNRTQGTTSGTTNQSRLLFSQAGPQSMSLQARNWLPGPCYRQQRLSKTANDNNNSNFPWTAASKYHLNGRDSLVNPGPAMASHKDDEEKFFPMHGNLIFGKEGTTASNAELDNVMITDEEEIRTTNPVATEQYGTVANNLQSSNTAPTTRTVNDQGALPGMVWQDRDVYLQGPIWAKIPHTDGHFHPSPLMGGFGLKHPPPQIMIKNTPVPANPPTTFSPAKFASFITQYSTGQVSVEIEWELQKENSKRWNPEIQYTSNYNKSVNVDFTVDTNGVYSEPRPIGTRYLTRPL

SEQ ID NO: 15 - protein, 763 aa, Artificial Sequence
  Viral Peptide
MAADGYLPDWLEDNLSEGIREWWALQPGAPKPKANQFGNYNNQSSNFGPLRGGNFGGRSSGPYQHQDNARGLVLPGYKYLGPGNGLDKGEPVNAADAAALEHDKAYDQQLKAGDNPYLKYNHADAEFQERLKEDTSFGGNLGRAVFQAKKRLLEPLGLVEEAAKTAPGKKRPVDQSPQEPDSSSGVGKSGKQPARKRLNFGQTGDSESVPDPQPLGEPPAAPTSLGSNTMASGGGAPMADNNEGADGVGNSSGNWHCDSQWLGDRVITTSTRTWALPTYNNHLYKQISSQSGASNDNHYFGYSTPWGYFDFNRFHCHFSPRDWQRLINNNWGFRPKKLSFKLFNIQVKEVTQNDGTTTIANNLTSTVQVFTDSEYQLPYVLGSAHQGCLPPFPADVFMVPQYGYLTLNNGSQAVGRSSFYCLEYFPSQMLRTGNNFQFSYTFEDVPFHSSYAHSQSLDRLMNPLIDQYLYYLNRTQGTTSGTTNQSRLLFSQAGPQSMSLQARNWLPGPCYRQQRLSKTANDNNNSNFPWTAASKYHLNGRDSLVNPGPAMASHKDDEEKFFPMHGNLIFGKEGTTASNAELDNVMITDEEEIRTTNPVATEQYGTVANNLQSSNTAPTTRTVNDQGALPGMVWQDRDVYLQGPIWAKIPHTDGHFHPSPLMGGFGLKHPPPQIMIKNTPVPANPPTTFSPAKFASFITQYSTGQVSVEIEWELQKENSKRWNPEIQYTSNYNKSVNVDFTVDTNGVYSEPRPIGTRYLTRPL

SEQ ID NO: 16 - protein, 763 aa, Artificial Sequence
  Viral Peptide
MAADGYLPDWLEDNLSEGIREWWALQPGAPKPKAFGNYNNQSSNFGPLKGGNFGGRSSGPYNQQHQDNARGLVLPGYKYLGPGNGLDKGEPVNAADAAALEHDKAYDQQLKAGDNPYLKYNHADAEFQERLKEDTSFGGNLGRAVFQAKKRLLEPLGLVEEAAKTAPGKKRPVDQSPQEPDSSSGVGKSGKQPARKRLNFGQTGDSESVPDPQPLGEPPAAPTSLGSNTMASGGGAPMADNNEGADGVGNSSGNWHCDSQWLGDRVITTSTRTWALPTYNNHLYKQISSQSGASNDNHYFGYSTPWGYFDFNRFHCHFSPRDWQRLINNNWGFRPKKLSFKLFNIQVKEVTQNDGTTTIANNLTSTVQVFTDSEYQLPYVLGSAHQGCLPPFPADVFMVPQYGYLTLNNGSQAVGRSSFYCLEYFPSQMLRTGNNFQFSYTFEDVPFHSSYAHSQSLDRLMNPLIDQYLYYLNRTQGTTSGTTNQSRLLFSQAGPQSMSLQARNWLPGPCYRQQRLSKTANDNNNSNFPWTAASKYHLNGRDSLVNPGPAMASHKDDEEKFFPMHGNLIFGKEGTTASNAELDNVMITDEEEIRTTNPVATEQYGTVANNLQSSNTAPTTRTVNDQGALPGMVWQDRDVYLQGPIWAKIPHTDGHFHPSPLMGGFGLKHPPPQIMIKNTPVPANPPTTFSPAKFASFITQYSTGQVSVEIEWELQKENSKRWNPEIQYTSNYNKSVNVDFTVDTNGVYSEPRPIGTRYLTRPL

SEQ ID NO: 17 - protein, 763 aa, Artificial Sequence; identical to SEQ ID NO: 16
  Viral Peptide

SEQ ID NO: 18 - protein, 745 aa, Artificial Sequence
  NLS Peptide
MAADGYLPDWLEDNLSEGIREWWALQPGAPKPKANQQHQDNARGLVLPGYKYLGPGNGLDKGEPVNAADAAALEHDKAYDQQLKAGDNPYLKYNHADAEFQERLKEDTSFGGNLGRAVFQAKKRLLEPLGLVEEAAKTPAAKRVKLDAPGKKRPVDQSPQEPDSSSGVGKSGKQPARKRLNFGQTGDSESVPDPQPLGEPPAAPTSLGSNTMASGGGAPMADNNEGADGVGNSSGNWHCDSQWLGDRVITTSTRTWALPTYNNHLYKQISSQSGASNDNHYFGYSTPWGYFDFNRFHCHFSPRDWQRLINNNWGFRPKKLSFKLFNIQVKEVTQNDGTTTIANNLTSTVQVFTDSEYQLPYVLGSAHQGCLPPFPADVFMVPQYGYLTLNNGSQAVGRSSFYCLEYFPSQMLRTGNNFQFSYTFEDVPFHSSYAHSQSLDRLMNPLIDQYLYYLNRTQGTTSGTTNQSRLLFSQAGPQSMSLQARNWLPGPCYRQQRLSKTANDNNNSNFPWTAASKYHLNGRDSLVNPGPAMASHKDDEEKFFPMHGNLIFGKEGTTASNAELDNVMITDEEEIRTTNPVATEQYGTVANNLQSSNTAPTTRTVNDQGALPGMVWQDRDVYLQGPIWAKIPHTDGHFHPSPLMGGFGLKHPPPQIMIKNTPVPANPPTTFSPAKFASFITQYSTGQVSVEIEWELQKENSKRWNPEIQYTSNYNKSVNVDFTVDTNGVYSEPRPIGTRYLTRPL

SEQ ID NO: 19 - protein, 745 aa, Artificial Sequence
  NLS Peptide
MAADGYLPDWLEDNLSEGIREWWALQPGAPKPKANQQHQDNARGLVLPGYKYLGPGNGLDKGEPVNAADAAALEHDKAYDQQLKAGDNPYLKYNHADAEFQERLKEDTSFGGNLGRAVFQAKKRLLEPLGLVEEAAKTAPAAKRVKLDPGKKRPVDQSPQEPDSSSGVGKSGKQPARKRLNFGQTGDSESVPDPQPLGEPPAAPTSLGSNTMASGGGAPMADNNEGADGVGNSSGNWHCDSQWLGDRVITTSTRTWALPTYNNHLYKQISSQSGASNDNHYFGYSTPWGYFDFNRFHCHFSPRDWQRLINNNWGFRPKKLSFKLFNIQVKEVTQNDGTTTIANNLTSTVQVFTDSEYQLPYVLGSAHQGCLPPFPADVFMVPQYGYLTLNNGSQAVGRSSFYCLEYFPSQMLRTGNNFQFSYTFEDVPFHSSYAHSQSLDRLMNPLIDQYLYYLNRTQGTTSGTTNQSRLLFSQAGPQSMSLQARNWLPGPCYRQQRLSKTANDNNNSNFPWTAASKYHLNGRDSLVNPGPAMASHKDDEEKFFPMHGNLIFGKEGTTASNAELDNVMITDEEEIRTTNPVATEQYGTVANNLQSSNTAPTTRTVNDQGALPGMVWQDRDVYLQGPIWAKIPHTDGHFHPSPLMGGFGLKHPPPQIMIKNTPVPANPPTTFSPAKFASFITQYSTGQVSVEIEWELQKENSKRWNPEIQYTSNYNKSVNVDFTVDTNGVYSEPRPIGTRYLTRPL

SEQ ID NO: 20 - protein, 754 aa, Artificial Sequence
  NLS Peptide
MAADGYLPDWLEDNLSEGIREWWALQPGAPKPKAPAAKRVKLDNQQHQDNARGLVLPGYKYLGPGNGLDKGEPVNAADAAALEHDKAYDQQLKAGDNPYLKYNHADAEFQERLKEDTSFGGNLGRAVFQAKKRLLEPLGLVEEAAKTAPAAKRVKLDPGKKRPVDQSPQEPDSSSGVGKSGKQPARKRLNFGQTGDSESVPDPQPLGEPPAAPTSLGSNTMASGGGAPMADNNEGADGVGNSSGNWHCDSQWLGDRVITTSTRTWALPTYNNHLYKQISSQSGASNDNHYFGYSTPWGYFDFNRFHCHFSPRDWQRLINNNWGFRPKKLSFKLFNIQVKEVTQNDGTTTIANNLTSTVQVFTDSEYQLPYVLGSAHQGCLPPFPADVFMVPQYGYLTLNNGSQAVGRSSFYCLEYFPSQMLRTGNNFQFSYTFEDVPFHSSYAHSQSLDRLMNPLIDQYLYYLNRTQGTTSGTTNQSRLLFSQAGPQSMSLQARNWLPGPCYRQQRLSKTANDNNNSNFPWTAASKYHLNGRDSLVNPGPAMASHKDDEEKFFPMHGNLIFGKEGTTASNAELDNVMITDEEEIRTTNPVATEQYGTVANNLQSSNTAPTTRTVNDQGALPGMVWQDRDVYLQGPIWAKIPHTDGHFHPSPLMGGFGLKHPPPQIMIKNTPVPANPPTTFSPAKFASFITQYSTGQVSVEIEWELQKENSKRWNPEIQYTSNYNKSVNVDFTVDTNGVYSEPRPIGTRYLTRPL

SEQ ID NO: 21 - protein, 745 aa, Artificial Sequence
  Viral Peptide
MAADGYLPDWLEDNLSEGIREWWALQPGAPKPKANQQHQDNARGLVLPGYKYLGPGNGLDKGEPVNAADAAALEHDKAYDQQLKAGDNPYLKYNHADAEFQERLKEDTSFGGNLGRAVFQAKKRLLEPLGLVEEAAKTAPAARRVRLDPGKKRPVDQSPQEPDSSSGVGKSGKQPARKRLNFGQTGDSESVPDPQPLGEPPAAPTSLGSNTMASGGGAPMADNNEGADGVGNSSGNWHCDSQWLGDRVITTSTRTWALPTYNNHLYKQISSQSGASNDNHYFGYSTPWGYFDFNRFHCHFSPRDWQRLINNNWGFRPKKLSFKLFNIQVKEVTQNDGTTTIANNLTSTVQVFTDSEYQLPYVLGSAHQGCLPPFPADVFMVPQYGYLTLNNGSQAVGRSSFYCLEYFPSQMLRTGNNFQFSYTFEDVPFHSSYAHSQSLDRLMNPLIDQYLYYLNRTQGTTSGTTNQSRLLFSQAGPQSMSLQARNWLPGPCYRQQRLSKTANDNNNSNFPWTAASKYHLNGRDSLVNPGPAMASHKDDEEKFFPMHGNLIFGKEGTTASNAELDNVMITDEEEIRTTNPVATEQYGTVANNLQSSNTAPTTRTVNDQGALPGMVWQDRDVYLQGPIWAKIPHTDGHFHPSPLMGGFGLKHPPPQIMIKNTPVPANPPTTFSPAKFASFITQYSTGQVSVEIEWELQKENSKRWNPEIQYTSNYNKSVNVDFTVDTNGVYSEPRPIGTRYLTRPL

SEQ ID NO: 22 - protein, 754 aa, Artificial Sequence
  Viral Peptide
MAADGYLPDWLEDNLSEGIREWWALQPGAPKPKAPAARRVRLDNQQHQDNARGLVLPGYKYLGPGNGLDKGEPVNAADAAALEHDKAYDQQLKAGDNPYLKYNHADAEFQERLKEDTSFGGNLGRAVFQAKKRLLEPLGLVEEAAKTAPAARRVRLDPGKKRPVDQSPQEPDSSSGVGKSGKQPARKRLNFGQTGDSESVPDPQPLGEPPAAPTSLGSNTMASGGGAPMADNNEGADGVGNSSGNWHCDSQWLGDRVITTSTRTWALPTYNNHLYKQISSQSGASNDNHYFGYSTPWGYFDFNRFHCHFSPRDWQRLINNNWGFRPKKLSFKLFNIQVKEVTQNDGTTTIANNLTSTVQVFTDSEYQLPYVLGSAHQGCLPPFPADVFMVPQYGYLTLNNGSQAVGRSSFYCLEYFPSQMLRTGNNFQFSYTFEDVPFHSSYAHSQSLDRLMNPLIDQYLYYLNRTQGTTSGTTNQSRLLFSQAGPQSMSLQARNWLPGPCYRQQRLSKTANDNNNSNFPWTAASKYHLNGRDSLVNPGPAMASHKDDEEKFFPMHGNLIFGKEGTTASNAELDNVMITDEEEIRTTNPVATEQYGTVANNLQSSNTAPTTRTVNDQGALPGMVWQDRDVYLQGPIWAKIPHTDGHFHPSPLMGGFGLKHPPPQIMIKNTPVPANPPTTFSPAKFASFITQYSTGQVSVEIEWELQKENSKRWNPEIQYTSNYNKSVNVDFTVDTNGVYSEPRPIGTRYLTRPL

SEQ ID NO: 23 - protein, 763 aa, Artificial Sequence
  Viral Peptide
MAADGYLPDWLEDNLSEGIREWWALQPGAPKPKANQQHQDNARGLVLPGYKYLGPGNGLDKGEPVNAADAAALEHDKAYDQQLKAGDNPYLKYNHADAEFQERLKEDTSFGGNLGRAVFQAKKRLLEPLGLVEEAAKTAFGNYNNQSSNFGPLKGGNFGGRSSGPYPGKKRPVDQSPQEPDSSSGVGKSGKQPARKRLNFGQTGDSESVPDPQPLGEPPAAPTSLGSNTMASGGGAPMADNNEGADGVGNSSGNWHCDSQWLGDRVITTSTRTWALPTYNNHLYKQISSQSGASNDNHYFGYSTPWGYFDFNRFHCHFSPRDWQRLINNNWGFRPKKLSFKLFNIQVKEVTQNDGTTTIANNLTSTVQVFTDSEYQLPYVLGSAHQGCLPPFPADVFMVPQYGYLTLNNGSQAVGRSSFYCLEYFPSQMLRTGNNFQFSYTFEDVPFHSSYAHSQSLDRLMNPLIDQYLYYLNRTQGTTSGTTNQSRLLFSQAGPQSMSLQARNWLPGPCYRQQRLSKTANDNNNSNFPWTAASKYHLNGRDSLVNPGPAMASHKDDEEKFFPMHGNLIFGKEGTTASNAELDNVMITDEEEIRTTNPVATEQYGTVANNLQSSNTAPTTRTVNDQGALPGMVWQDRDVYLQGPIWAKIPHTDGHFHPSPLMGGFGLKHPPPQIMIKNTPVPANPPTTFSPAKFASFITQYSTGQVSVEIEWELQKENSKRWNPEIQYTSNYNKSVNVDFTVDTNGVYSEPRPIGTRYLTRPL

SEQ ID NO: 24 - protein, 772 aa, Artificial Sequence
  Viral Peptide
MAADGYLPDWLEDNLSEGIREWWALQPGAPKPKAPAAKRVKLDNQQHQDNARGLVLPGYKYLGPGNGLDKGEPVNAADAAALEHDKAYDQQLKAGDNPYLKYNHADAEFQERLKEDTSFGGNLGRAVFQAKKRLLEPLGLVEEAAKTAFGNYNNQSSNFGPLKGGNFGGRSSGPYPGKKRPVDQSPQEPDSSSGVGKSGKQPARKRLNFGQTGDSESVPDPQPLGEPPAAPTSLGSNTMASGGGAPMADNNEGADGVGNSSGNWHCDSQWLGDRVITTSTRTWALPTYNNHLYKQISSQSGASNDNHYFGYSTPWGYFDFNRFHCHFSPRDWQRLINNNWGFRPKKLSFKLFNIQVKEVTQNDGTTTIANNLTSTVQVFTDSEYQLPYVLGSAHQGCLPPFPADVFMVPQYGYLTLNNGSQAVGRSSFYCLEYFPSQMLRTGNNFQFSYTFEDVPFHSSYAHSQSLDRLMNPLIDQYLYYLNRTQGTTSGTTNQSRLLFSQAGPQSMSLQARNWLPGPCYRQQRLSKTANDNNNSNFPWTAASKYHLNGRDSLVNPGPAMASHKDDEEKFFPMHGNLIFGKEGTTASNAELDNVMITDEEEIRTTNPVATEQYGTVANNLQSSNTAPTTRTVNDQGALPGMVWQDRDVYLQGPIWAKIPHTDGHFHPSPLMGGFGLKHPPPQIMIKNTPVPANPPTTFSPAKFASFITQYSTGQVSVEIEWELQKENSKRWNPEIQYTSNYNKSVNVDFTVDTNGVYSEPRPIGTRYLTRPL

SEQ ID NO: 25 - protein, 772 aa, Artificial Sequence
  NLS Peptide
MAADGYLPDWLEDNLSEGIREWWALQPGAPKPKAFGNYNNQSSNFGPLKGGNFGGRSSGPYNQQHQDNARGLVLPGYKYLGPGNGLDKGEPVNAADAAALEHDKAYDQQLKAGDNPYLKYNHADAEFQERLKEDTSFGGNLGRAVFQAKKRLLEPLGLVEEAAKTAPAAKRVKLDPGKKRPVDQSPQEPDSSSGVGKSGKQPARKRLNFGQTGDSESVPDPQPLGEPPAAPTSLGSNTMASGGGAPMADNNEGADGVGNSSGNWHCDSQWLGDRVITTSTRTWALPTYNNHLYKQISSQSGASNDNHYFGYSTPWGYFDFNRFHCHFSPRDWQRLINNNWGFRPKKLSFKLFNIQVKEVTQNDGTTTIANNLTSTVQVFTDSEYQLPYVLGSAHQGCLPPFPADVFMVPQYGYLTLNNGSQAVGRSSFYCLEYFPSQMLRTGNNFQFSYTFEDVPFHSSYAHSQSLDRLMNPLIDQYLYYLNRTQGTTSGTTNQSRLLFSQAGPQSMSLQARNWLPGPCYRQQRLSKTANDNNNSNFPWTAASKYHLNGRDSLVNPGPAMASHKDDEEKFFPMHGNLIFGKEGTTASNAELDNVMITDEEEIRTTNPVATEQYGTVANNLQSSNTAPTTRTVNDQGALPGMVWQDRDVYLQGPIWAKIPHTDGHFHPSPLMGGFGLKHPPPQIMIKNTPVPANPPTTFSPAKFASFITQYSTGQVSVEIEWELQKENSKRWNPEIQYTSNYNKSVNVDFTVDTNGVYSEPRPIGTRYLTRPL

SEQ ID NO: 26 - protein, 763 aa, Artificial Sequence
  NLS Peptide
MAADGYLPDWLEDNLSEGIREWWALQPGAPKPKANQQHQDNARGLVLPGYKYLGPGNGLDKGEPVNAADAAALEHDKAYDQQLKAGDNPYLKYNHADAEFQERLKEDTSFGGNLGRAVFQAKKRLLEPLGLVEEAAKTAYGDYSNQQSGYGKVSRRGGHQNSYKPYPGKKRPVDQSPQEPDSSSGVGKSGKQPARKRLNFGQTGDSESVPDPQPLGEPPAAPTSLGSNTMASGGGAPMADNNEGADGVGNSSGNWHCDSQWLGDRVITTSTRTWALPTYNNHLYKQISSQSGASNDNHYFGYSTPWGYFDFNRFHCHFSPRDWQRLINNNWGFRPKKLSFKLFNIQVKEVTQNDGTTTIANNLTSTVQVFTDSEYQLPYVLGSAHQGCLPPFPADVFMVPQYGYLTLNNGSQAVGRSSFYCLEYFPSQMLRTGNNFQFSYTFEDVPFHSSYAHSQSLDRLMNPLIDQYLYYLNRTQGTTSGTTNQSRLLFSQAGPQSMSLQARNWLPGPCYRQQRLSKTANDNNNSNFPWTAASKYHLNGRDSLVNPGPAMASHKDDEEKFFPMHGNLIFGKEGTTASNAELDNVMITDEEEIRTTNPVATEQYGTVANNLQSSNTAPTTRTVNDQGALPGMVWQDRDVYLQGPIWAKIPHTDGHFHPSPLMGGFGLKHPPPQIMIKNTPVPANPPTTFSPAKFASFITQYSTGQVSVEIEWELQKENSKRWNPEIQYTSNYNKSVNVDFTVDTNGVYSEPRPIGTRYLTRPL

SEQ ID NO: 27 - protein, 736 aa, Artificial Sequence
  Viral Peptide
MAADGYLPDWLEDNLSEGIREWWALQPGAPKPKANQQHQDNARGLVLPGYKYLGPGNGLDKGEPVNAADAAALEHDKAYDQQLKAGDNPYLKYNHADAEFQERLKEDTSFGGNLGRAVFQAKKRLLEPLGLVEEAAKTAPGKKRPVDQSPQEPDSSSGVGKSGKQPARKRLNFGQTGDSESVPDPQPLGEPPAAPTSLGSNTMASGGGAPMADNNEGADGVGNSSGNWHCDSQWLGDRVITTSTRTWALPTYNNHLYKQISSQSGASNDNHYFGYSTPWGYFDFNRFHCHFSPRDWQRLINNNWGFRPKKLSFKLFNIQVKEVTQNDGTTTIANNLTSTVQVFTDSEYQLPYVLGSAHQGCLPPFPADVFMVPQYGYLTLNNGSQAVGRSSFYCLEYFPSQMLRTGNNFQFSYTFEDVPFHSSYAHSQSLDRLMNPLIDQYLYYLNRTQGTTSGTTNQSRLLFSQAGPQSMSLQARNWLPGPCYRQQRLSKVANDNNNSNFPWTAASKYHLNGRDSLVNPGPAMASHKDDEEKFFPMHGNLIFGKEGTTASNAELDNVMITDEEEIRTTNPVATEQYGTVANNLQSSNTAPTTRTVNDQGALPGMVWQDRDVYLQGPIWAKIPHTDGHFHPSPLMGGFGLKHPPPQIMIKNTPVPANPPTTFSPAKFASFITQYSTGQVSVEIEWELQKENSKRWNPEIQYTSNYNKSVNVDFTVDTNGVYSEPRPIGTRYLTRPL

SEQ ID NO: 28 - protein, 736 aa, Artificial Sequence
  Viral Peptide
MAADGYLPDWLEDNLSEGIREWWALQPGAPKPKANQQHQDNARGLVLPGYKYLGPGNGLDKGEPVNAADAAALEHDKAYDQQLKAGDNPYLKYNHADAEFQERLKEDTSFGGNLGRAVFQAKKRLLEPLGLVEEAAKTAPGKKRPVDQSPQEPDSSSGVGKSGKQPARKRLNFGQTGDSESVPDPQPLGEPPAAPTSLGSNTMASGGGAPMADNNEGADGVGNSSGNWHCDSQWLGDRVITTSTRTWALPTYNNHLYKQISSQSGASNDNHYFGYSTPWGYFDFNRFHCHFSPRDWQRLINNNWGFRPKKLSFKLFNIQVKEVTQNDGTTTIANNLTSTVQVFTDSEYQLPYVLGSAHQGCLPPFPADVFMVPQYGYLTLNNGSQAVGRSSFYCLEYFPSQMLRTGNNFQFSYTFEDVPFHSSYAHSQSLDRLMNPLIDQYLYYLNRTQGTTSGTTNQSRLLFSQAGPQSMSLQARNWLPGPCYRQQRLSKTANDNNNSNFPWTAASKYHLNGRDSLVNPGPAMASHKDDEEKFFPMHGNLIFGKEGTTASNAELDNVMITDEEEIRTTNPVATEQYGTVANNLQSSNTAPTTRTVNDQGALPGMVWQDRDVYLQGPIWAKIPHTDGHFHPSPLMGGFGLKHPPPQIMIKNTPVPANPPTTFVPAKFASFITQYSTGQVSVEIEWELQKENSKRWNPEIQYTSNYNKSVNVDFTVDTNGVYSEPRPIGTRYLTRPL

SEQ ID NO: 29 - protein, 736 aa, Artificial Sequence
  Viral Peptide
MAADGYLPDWLEDNLSEGIREWWALQPGAPKPKANQQHQDNARGLVLPGYKYLGPGNGLDKGEPVNAADAAALEHDKAYDQQLKAGDNPYLKYNHADAEFQERLKEDTSFGGNLGRAVFQAKKRLLEPLGLVEEAAKTAPGKKRPVDQSPQEPDSSSGVGKSGKQPARKRLNFGQTGDSESVPDPQPLGEPPAAPTSLGSNTMASGGGAPMADNNEGADGVGNSSGNWHCDSQWLGDRVITTSTRTWALPTYNNHLYKQISSQSGASNDNHYFGYSTPWGYFDFNRFHCHFSPRDWQRLINNNWGFRPKKLSFKLFNIQVKEVTQNDGTTTIANNLTSTVQVFTDSEYQLPYVLGSAHQGCLPPFPADVFMVPQYGYLTLNNGSQAVGRSSFYCLEYFPSQMLRTGNNFQFSYTFEDVPFHSSYAHSQSLDRLMNPLIDQYLYYLNRTQGTTSGTTNQSRLLFSQAGPQSMSLQARNWLPGPCYRQQRLSKVANDNNNSNFPWTAASKYHLNGRDSLVNPGPAMASHKDDEEKFFPMHGNLIFGKEGTTASNAELDNVMITDEEEIRTTNPVATEQYGTVANNLQSSNTAPTTRTVNDQGALPGMVWQDRDVYLQGPIWAKIPHTDGHFHPSPLMGGFGLKHPPPQIMIKNTPVPANPPTTFVPAKFASFITQYSTGQVSVEIEWELQKENSKRWNPEIQYTSNYNKSVNVDFTVDTNGVYSEPRPIGTRYLTRPL

SEQ ID NO: 30 - protein, 736 aa, Artificial Sequence
  Viral Peptide
MAADGYLPDWLEDNLSEGIREWWALQPGAPKPKANQQHQDNARGLVLPGYKYLGPGNGLDKGEPVNAADAAALEHDKAYDQQLKAGDNPYLKYNHADAEFQERLKEDTSFGGNLGRAVFQAKKRLLEPLGLVEEAARTAPGKKRPVDQSPQEPDSSSGVGKSGKQPARKRLNFGQTGDSESVPDPQPLGEPPAAPTSLGSNTMASGGGAPMADNNEGADGVGNSSGNWHCDSQWLGDRVITTSTRTWALPTYNNHLYKQISSQSGASNDNHYFGYSTPWGYFDFNRFHCHFSPRDWQRLINNNWGFRPKKLSFKLFNIQVKEVTQNDGTTTIANNLTSTVQVFTDSEYQLPYVLGSAHQGCLPPFPADVFMVPQYGYLTLNNGSQAVGRSSFYCLEYFPSQMLRTGNNFQFSYTFEDVPFHSSYAHSQSLDRLMNPLIDQYLYYLNRTQGTTSGTTNQSRLLFSQAGPQSMSLQARNWLPGPCYRQQRLSKVANDNNNSNFPWTAASKYHLNGRDSLVNPGPAMASHKDDEEKFFPMHGNLIFGKEGTTASNAELDNVMITDEEEIRTTNPVATEQYGTVANNLQSSNTAPTTRTVNDQGALPGMVWQDRDVYLQGPIWAKIPHTDGHFHPSPLMGGFGLKHPPPQIMIKNTPVPANPPTTFSPAKFASFITQYSTGQVSVEIEWELQKENSKRWNPEIQYTSNYNKSVNVDFTVDTNGVYSEPRPIGTRYLTRPL

SEQ ID NO: 31 - protein, 736 aa, Artificial Sequence
  Viral Peptide
MAADGYLPDWLEDNLSEGIREWWALQPGAPKPKANQQHQDNARGLVLPGYKYLGPGNGLDKGEPVNAADAAALEHDKAYDQQLKAGDNPYLKYNHADAEFQERLKEDTSFGGNLGRAVFQAKKRLLEPLGLVEEAARTAPGKKRPVDQSPQEPDSSSGVGKSGKQPARKRLNFGQTGDSESVPDPQPLGEPPAAPTSLGSNTMASGGGAPMADNNEGADGVGNSSGNWHCDSQWLGDRVITTSTRTWALPTYNNHLYKQISSQSGASNDNHYFGYSTPWGYFDFNRFHCHFSPRDWQRLINNNWGFRPKKLSFKLFNIQVKEVTQNDGTTTIANNLTSTVQVFTDSEYQLPYVLGSAHQGCLPPFPADVFMVPQYGYLTLNNGSQAVGRSSFYCLEYFPSQMLRTGNNFQFSYTFEDVPFHSSYAHSQSLDRLMNPLIDQYLYYLNRTQGTTSGTTNQSRLLFSQAGPQSMSLQARNWLPGPCYRQQRLSKTANDNNNSNFPWTAASKYHLNGRDSLVNPGPAMASHKDDEEKFFPMHGNLIFGKEGTTASNAELDNVMITDEEEIRTTNPVATEQYGTVANNLQSSNTAPTTRTVNDQGALPGMVWQDRDVYLQGPIWAKIPHTDGHFHPSPLMGGFGLKHPPPQIMIKNTPVPANPPTTFVPAKFASFITQYSTGQVSVEIEWELQKENSKRWNPEIQYTSNYNKSVNVDFTVDTNGVYSEPRPIGTRYLTRPL

SEQ ID NO: 32 - protein, 736 aa, Artificial Sequence
  Viral Peptide
MAADGYLPDWLEDNLSEGIREWWALQPGAPKPKANQQHQDNARGLVLPGYKYLGPGNGLDKGEPVNAADAAALEHDKAYDQQLKAGDNPYLKYNHADAEFQERLKEDTSFGGNLGRAVFQAKKRLLEPLGLVEEAARTAPGKKRPVDQSPQEPDSSSGVGKSGKQPARKRLNFGQTGDSESVPDPQPLGEPPAAPTSLGSNTMASGGGAPMADNNEGADGVGNSSGNWHCDSQWLGDRVITTSTRTWALPTYNNHLYKQISSQSGASNDNHYFGYSTPWGYFDFNRFHCHFSPRDWQRLINNNWGFRPKKLSFKLFNIQVKEVTQNDGTTTIANNLTSTVQVFTDSEYQLPYVLGSAHQGCLPPFPADVFMVPQYGYLTLNNGSQAVGRSSFYCLEYFPSQMLRTGNNFQFSYTFEDVPFHSSYAHSQSLDRLMNPLIDQYLYYLNRTQGTTSGTTNQSRLLFSQAGPQSMSLQARNWLPGPCYRQQRLSKVANDNNNSNFPWTAASKYHLNGRDSLVNPGPAMASHKDDEEKFFPMHGNLIFGKEGTTASNAELDNVMITDEEEIRTTNPVATEQYGTVANNLQSSNTAPTTRTVNDQGALPGMVWQDRDVYLQGPIWAKIPHTDGHFHPSPLMGGFGLKHPPPQIMIKNTPVPANPPTTFVPAKFASFITQYSTGQVSVEIEWELQKENSKRWNPEIQYTSNYNKSVNVDFTVDTNGVYSEPRPIGTRYLTRPL

SEQ ID NO: 33 - protein, 736 aa, Artificial Sequence
  Viral Peptide
MAADGYLPDWLEDNLSEGIREWWALQPGAPKPKANQQHQDNARGLVLPGAKYLGPGNGLDKGEPVNAADAAALEHDKAYDQQLKAGDNPYLKYNHADAEFQERLKEDTSFGGNLGRAVFQAKKRLLEPLGLVEEAAKTAPGKKRPVDQSPQEPDSSSGVGKSGKQPARKRLNFGQTGDSESVPDPQPLGEPPAAPTSLGSNTMASGGGAPMADNNEGADGVGNSSGNWHCDSQWLGDRVITTSTRTWALPTYNNHLYKQISSQSGASNDNHYFGYSTPWGYFDFNRFHCHFSPRDWQRLINNNWGFRPKKLSFKLFNIQVKEVTQNDGTTTIANNLTSTVQVFTDSEYQLPYVLGSAHQGCLPPFPADVFMVPQYGYLTLNNGSQAVGRSSFYCLEYFPSQMLRTGNNFQFSYTFEDVPFHSSYAHSQSLDRLMNPLIDQYLYYLNRTQGTTSGTTNQSRLLFSQAGPQSMSLQARNWLPGPCYRQQRLSKTANDNNNSNFPWTAASKYHLNGRDSLVNPGPAMASHKDDEEKFFPMHGNLIFGKEGTTASNAELDNVMITDEEEIRTTNPVATEQYGTVANNLQSSNTAPTTRTVNDQGALPGMVWQDRDVYLQGPIWAKIPHTDGHFHPSPLMGGFGLKHPPPQIMIKNTPVPANPPTTFSPAKFASFITQYSTGQVSVEIEWELQKENSKRWNPEIQYTSNYNKSVNVDFTVDTNGVYSEPRPIGTRYLTRPL

SEQ ID NO: 34 - protein, 736 aa, Artificial Sequence
  Viral Peptide
MAADGYLPDWLEDNLSEGIREWWALQPGAPKPKANQQHQDNARGLVLPGFKYLGPGNGLDKGEPVNAADAAALEHDKAYDQQLKAGDNPYLKYNHADAEFQERLKEDTSFGGNLGRAVFQAKKRLLEPLGLVEEAAKTAPGKKRPVDQSPQEPDSSSGVGKSGKQPARKRLNFGQTGDSESVPDPQPLGEPPAAPTSLGSNTMASGGGAPMADNNEGADGVGNSSGNWHCDSQWLGDRVITTSTRTWALPTYNNHLYKQISSQSGASNDNHYFGYSTPWGYFDFNRFHCHFSPRDWQRLINNNWGFRPKKLSFKLFNIQVKEVTQNDGTTTIANNLTSTVQVFTDSEYQLPYVLGSAHQGCLPPFPADVFMVPQYGYLTLNNGSQAVGRSSFYCLEYFPSQMLRTGNNFQFSYTFEDVPFHSSYAHSQSLDRLMNPLIDQYLYYLNRTQGTTSGTTNQSRLLFSQAGPQSMSLQARNWLPGPCYRQQRLSKTANDNNNSNFPWTAASKYHLNGRDSLVNPGPAMASHKDDEEKFFPMHGNLIFGKEGTTASNAELDNVMITDEEEIRTTNPVATEQYGTVANNLQSSNTAPTTRTVNDQGALPGMVWQDRDVYLQGPIWAKIPHTDGHFHPSPLMGGFGLKHPPPQIMIKNTPVPANPPTTFSPAKFASFITQYSTGQVSVEIEWELQKENSKRWNPEIQYTSNYNKSVNVDFTVDTNGVYSEPRPIGTRYLTRPL

SEQ ID NO: 35 - protein, 736 aa, Artificial Sequence
  Viral Peptide
MAADGYLPDWLEDNLSEGIREWWALQPGAPKPKANQQHQDNARGLVLPGEKYLGPGNGLDKGEPVNAADAAALEHDKAYDQQLKAGDNPYLKYNHADAEFQERLKEDTSFGGNLGRAVFQAKKRLLEPLGLVEEAAKTAPGKKRPVDQSPQEPDSSSGVGKSGKQPARKRLNFGQTGDSESVPDPQPLGEPPAAPTSLGSNTMASGGGAPMADNNEGADGVGNSSGNWHCDSQWLGDRVITTSTRTWALPTYNNHLYKQISSQSGASNDNHYFGYSTPWGYFDFNRFHCHFSPRDWQRLINNNWGFRPKKLSFKLFNIQVKEVTQNDGTTTIANNLTSTVQVFTDSEYQLPYVLGSAHQGCLPPFPADVFMVPQYGYLTLNNGSQAVGRSSFYCLEYFPSQMLRTGNNFQFSYTFEDVPFHSSYAHSQSLDRLMNPLIDQYLYYLNRTQGTTSGTTNQSRLLFSQAGPQSMSLQARNWLPGPCYRQQRLSKTANDNNNSNFPWTAASKYHLNGRDSLVNPGPAMASHKDDEEKFFPMHGNLIFGKEGTTASNAELDNVMITDEEEIRTTNPVATEQYGTVANNLQSSNTAPTTRTVNDQGALPGMVWQDRDVYLQGPIWAKIPHTDGHFHPSPLMGGFGLKHPPPQIMIKNTPVPANPPTTFSPAKFASFITQYSTGQVSVEIEWELQKENSKRWNPEIQYTSNYNKSVNVDFTVDTNGVYSEPRPIGTRYLTRPL

SEQ ID NO: 36 - protein, 736 aa, Artificial Sequence
  Viral Peptide
MAADGYLPDWLEDNLSEGIREWWALQPGAPKPKANQQHQDNARGLVLPGYKYLGPGNGLDKGEPVNAADAAALEHDKAYDQQLKAGDNPYLKYNHADAEFQERLKEDTSFGGNLGRAVFQAKKRLLEPLGLVEEAAKTAPGKKRPVDQSPQEPDSSSGVGKSGKQPARKRLNFGQTGDSESVPDPQPLGEPPAAPTSLGSNTMASGGGAPMADNNEGADGVGNSSGNWHCDSQWLGDRVITTSTRTWALPTANNHLYKQISSQSGASNDNHYFGYSTPWGYFDFNRFHCHFSPRDWQRLINNNWGFRPKKLSFKLFNIQVKEVTQNDGTTTIANNLTSTVQVFTDSEYQLPYVLGSAHQGCLPPFPADVFMVPQYGYLTLNNGSQAVGRSSFYCLEYFPSQMLRTGNNFQFSYTFEDVPFHSSYAHSQSLDRLMNPLIDQYLYYLNRTQGTTSGTTNQSRLLFSQAGPQSMSLQARNWLPGPCYRQQRLSKTANDNNNSNFPWTAASKYHLNGRDSLVNPGPAMASHKDDEEKFFPMHGNLIFGKEGTTASNAELDNVMITDEEEIRTTNPVATEQYGTVANNLQSSNTAPTTRTVNDQGALPGMVWQDRDVYLQGPIWAKIPHTDGHFHPSPLMGGFGLKHPPPQIMIKNTPVPANPPTTFSPAKFASFITQYSTGQVSVEIEWELQKENSKRWNPEIQYTSNYNKSVNVDFTVDTNGVYSEPRPIGTRYLTRPL

SEQ ID NO: 37 - protein, 736 aa, Artificial Sequence
  Viral Peptide
MAADGYLPDWLEDNLSEGIREWWALQPGAPKPKANQQHQDNARGLVLPGYKYLGPGNGLDKGEPVNAADAAALEHDKAYDQQLKAGDNPYLKYNHADAEFQERLKEDTSFGGNLGRAVFQAKKRLLEPLGLVEEAAKTAPGKKRPVDQSPQEPDSSSGVGKSGKQPARKRLNFGQTGDSESVPDPQPLGEPPAAPTSLGSNTMASGGGAPMADNNEGADGVGNSSGNWHCDSQWLGDRVITTSTRTWALPTFNNHLYKQISSQSGASNDNHYFGYSTPWGYFDFNRFHCHFSPRDWQRLINNNWGFRPKKLSFKLFNIQVKEVTQNDGTTTIANNLTSTVQVFTDSEYQLPYVLGSAHQGCLPPFPADVFMVPQYGYLTLNNGSQAVGRSSFYCLEYFPSQMLRTGNNFQFSYTFEDVPFHSSYAHSQSLDRLMNPLIDQYLYYLNRTQGTTSGTTNQSRLLFSQAGPQSMSLQARNWLPGPCYRQQRLSKTANDNNNSNFPWTAASKYHLNGRDSLVNPGPAMASHKDDEEKFFPMHGNLIFGKEGTTASNAELDNVMITDEEEIRTTNPVATEQYGTVANNLQSSNTAPTTRTVNDQGALPGMVWQDRDVYLQGPIWAKIPHTDGHFHPSPLMGGFGLKHPPPQIMIKNTPVPANPPTTFSPAKFASFITQYSTGQVSVEIEWELQKENSKRWNPEIQYTSNYNKSVNVDFTVDTNGVYSEPRPIGTRYLTRPL

SEQ ID NO: 38 - protein, 736 aa, Artificial Sequence
  Viral Peptide
MAADGYLPDWLEDNLSEGIREWWALQPGAPKPKANQQHQDNARGLVLPGYKYLGPGNGLDKGEPVNAADAAALEHDKAYDQQLKAGDNPYLKYNHADAEFQERLKEDTSFGGNLGRAVFQAKKRLLEPLGLVEEAAKTAPGKKRPVDQSPQEPDSSSGVGKSGKQPARKRANFGQTGDSESVPDPQPLGEPPAAPTSLGSNTMASGGGAPMADNNEGADGVGNSSGNWHCDSQWLGDRVITTSTRTWALPTYNNHLYKQISSQSGASNDNHYFGYSTPWGYFDFNRFHCHFSPRDWQRLINNNWGFRPKKLSFKLFNIQVKEVTQNDGTTTIANNLTSTVQVFTDSEYQLPYVLGSAHQGCLPPFPADVFMVPQYGYLTLNNGSQAVGRSSFYCLEYFPSQMLRTGNNFQFSYTFEDVPFHSSYAHSQSLDRLMNPLIDQYLYYLNRTQGTTSGTTNQSRLLFSQAGPQSMSLQARNWLPGPCYRQQRLSKTANDNNNSNFPWTAASKYHLNGRDSLVNPGPAMASHKDDEEKFFPMHGNLIFGKEGTTASNAELDNVMITDEEEIRTTNPVATEQYGTVANNLQSSNTAPTTRTVNDQGALPGMVWQDRDVYLQGPIWAKIPHTDGHFHPSPLMGGFGLKHPPPQIMIKNTPVPANPPTTFSPAKFASFITQYSTGQVSVEIEWELQKENSKRWNPEIQYTSNYNKSVNVDFTVDTNGVYSEPRPIGTRYLTRPL

SEQ ID NO: 39 - protein, 736 aa, Artificial Sequence
  Viral Peptide
MAADGYLPDWLEDNLSEGIREWWALQPGAPKPKANQQHQDNARGLVLPGYKYLGPGNGLDKGEPVNAADAAALEHDKAYDQQLKAGDNPYLKYNHADAEFQERLKEDTSFGGNLGRAVFQAKKRLLEPLGLVEEAAKTAPGKKRPVDQSPQEPDSSSGVGKSGKQPARKRLNFGQTGDSESVPDPQPLGEPPAAPTSLGSNTMASGGGAPMADNNEGADGVGNSSGNWHCDSQWLGDRVITTSTRTWALPTYNNHLYKQISSQSGASNDNHYFGYSTPWGYFDFNRFHCHFSPRDWQRLINNNWGFRPKKLSFKLFNIQVKEVTQNDGTTTIANNLTSTVQVFTDSEYQLPYVLGSAHQGCLPPFPADVFMVPQYGYLTLNNGSQAVGRSSFYCLEYFPSQMLRTGNNFQFSYTFEDVPFHSSYAHSQSLDRLMNPLIDQYLYYLNRTQGTTSGTTNQSRLLFSQAGPQSMSLQARNWAPGPCYRQQRLSKTANDNNNSNFPWTAASKYHLNGRDSLVNPGPAMASHKDDEEKFFPMHGNLIFGKEGTTASNAELDNVMITDEEEIRTTNPVATEQYGTVANNLQSSNTAPTTRTVNDQGALPGMVWQDRDVYLQGPIWAKIPHTDGHFHPSPLMGGFGLKHPPPQIMIKNTPVPANPPTTFSPAKFASFITQYSTGQVSVEIEWELQKENSKRWNPEIQYTSNYNKSVNVDFTVDTNGVYSEPRPIGTRYLTRPL

SEQ ID NO: 40 - protein, 736 aa, Artificial Sequence
  Viral Peptide
MAADGYLPDWLEDNLSEGIREWWALQPGAPKPKANQQHQDNARGLVLPGYKYLGPGNGLDKGEPVNAADAAALEHDKAYDQQLKAGDNPYLKYNHADAEFQERLKEDTSFGGNLGRAVFQAKKRLLEPLGLVEEAAKTAPGKKRPVDQSPQEPDSSSGVGKSGKQPARKRLNFGQTGDSESVPDPQPLGEPPAAPTSLGSNTMASGGGAPMADNNEGADGVGNSSGNWHCDSQWLGDRVITTSTRTWALPTYNNHLYKQISSQSGASNDNHYFGYSTPWGYFDFNRFHCHFSPRDWQRLINNNWGFRPKKLSFKLFNIQVKEVTQNDGTTTIANNLTSTVQVFTDSEYQLPYVLGSAHQGCLPPFPADVFMVPQYGYLTLNNGSQAVGRSSFYCLEYFPSQMLRTGNNFQFSYTFEDVPFHSSYAHSQSLDRLMNPLIDQYLYYLNRTQGTTSGTTNQSRLLFSQAGPQSMSLQARNWLPGPCYRQQRLSKTANDNNNSNFPWTAASKYHLNGRDSAVNPGPAMASHKDDEEKFFPMHGNLIFGKEGTTASNAELDNVMITDEEEIRTTNPVATEQYGTVANNLQSSNTAPTTRTVNDQGALPGMVWQDRDVYLQGPIWAKIPHTDGHFHPSPLMGGFGLKHPPPQIMIKNTPVPANPPTTFSPAKFASFITQYSTGQVSVEIEWELQKENSKRWNPEIQYTSNYNKSVNVDFTVDTNGVYSEPRPIGTRYLTRPL

SEQ ID NO: 41 - protein, 736 aa, Artificial Sequence
  Viral Peptide
MAADGYLPDWLEDNLSEGIREWWALQPGAPKPKANQQHQDNARGLVLPGYKYLGPGNGLDKGEPVNAADAAALEHDKAYDQQLKAGDNPYLKYNHADAEFQERLKEDTSFGGNLGRAVFQAKKRLLEPLGLVEEAAKTAPGKKRPVDQSPQEPDSSSGVGKSGKQPARKRLNFGQTGDSESVPDPQPLGEPPAAPTSLGSNTMASGGGAPMADNNEGADGVGNSSGNWHCDSQWLGDRVITTSTRTWALPTYNNHLYKQISSQSGASNDNHYFGYSTPWGYFDFNRFHCHFSPRDWQRLINNNWGFRPKKLSFKLFNIQVKEVTQNDGTTTIANNLTSTVQVFTDSEYQLPYVLGSAHQGCLPPFPADVFMVPQYGYLTLNNGSQAVGRSSFYCLEYFPSQMLRTGNNFQFSYTFEDVPFHSSYAHSQSLDRLMNPLIDQYLYYLNRTQGTTSGTTNQSRLLFSQAGPQSMSLQARNWLPGPCYRQQRLSKTANDNNNSNFPWTAASKYHLNGRDSLVNPGPAMASHKDDEEKFFPMHGNLIFGKEGTTASNAELDNVMITDEEEIRTTNPVATEQYGTVANNLQSSNTAPTTRTVNDQGALPGMVWQDRDVYLQGPIWAKIPHTDGHFHPSPLMGGFGLKHPPPQIMIKNTPVPANPPTTFSPAKFASFITQYSTGQVSVEIEWELQKEASKRWNPEIQYTSNYNKSVNVDFTVDTNGVYSEPRPIGTRYLTRPL

SEQ ID NO: 42 - protein, 763 aa, Artificial Sequence
  NLS Peptide
MAADGYLPDWLEDNLSEGIREWWALQPGAPKPKANQQHQDNARGLVLPGYKYLGPGNGLDKGEPVNAADAAALEHDKAYDQQLKAGDNPYLKYNHADAEFQERLKEDTSFGGNLGRAVFQAKKRLLEPLGLVEEAAKTAGEGERPAQNEKRKEKNIKRGGNRFEPYPGKKRPVDQSPQEPDSSSGVGKSGKQPARKRLNFGQTGDSESVPDPQPLGEPPAAPTSLGSNTMASGGGAPMADNNEGADGVGNSSGNWHCDSQWLGDRVITTSTRTWALPTYNNHLYKQISSQSGASNDNHYFGYSTPWGYFDFNRFHCHFSPRDWQRLINNNWGFRPKKLSFKLFNIQVKEVTQNDGTTTIANNLTSTVQVFTDSEYQLPYVLGSAHQGCLPPFPADVFMVPQYGYLTLNNGSQAVGRSSFYCLEYFPSQMLRTGNNFQFSYTFEDVPFHSSYAHSQSLDRLMNPLIDQYLYYLNRTQGTTSGTTNQSRLLFSQAGPQSMSLQARNWLPGPCYRQQRLSKTANDNNNSNFPWTAASKYHLNGRDSLVNPGPAMASHKDDEEKFFPMHGNLIFGKEGTTASNAELDNVMITDEEEIRTTNPVATEQYGTVANNLQSSNTAPTTRTVNDQGALPGMVWQDRDVYLQGPIWAKIPHTDGHFHPSPLMGGFGLKHPPPQIMIKNTPVPANPPTTFSPAKFASFITQYSTGQVSVEIEWELQKENSKRWNPEIQYTSNYNKSVNVDFTVDTNGVYSEPRPIGTRYLTRPL

SEQ ID NO: 43 - protein, 765 aa, Artificial Sequence
  NLS Peptide
MAADGYLPDWLEDNLSEGIREWWALQPGAPKPKANQQHQDNARGLVLPGYKYLGPGNGLDKGEPVNAADAAALEHDKAYDQQLKAGDNPYLKYNHADAEFQERLKEDTSFGGNLGRAVFQAKKRLLEPLGLVEEAAKTARYLTQETNKVETYKEQPLKTPGKKKKGKPPGKKRPVDQSPQEPDSSSGVGKSGKQPARKRLNFGQTGDSESVPDPQPLGEPPAAPTSLGSNTMASGGGAPMADNNEGADGVGNSSGNWHCDSQWLGDRVITTSTRTWALPTYNNHLYKQISSQSGASNDNHYFGYSTPWGYFDFNRFHCHFSPRDWQRLINNNWGFRPKKLSFKLFNIQVKEVTQNDGTTTIANNLTSTVQVFTDSEYQLPYVLGSAHQGCLPPFPADVFMVPQYGYLTLNNGSQAVGRSSFYCLEYFPSQMLRTGNNFQFSYTFEDVPFHSSYAHSQSLDRLMNPLIDQYLYYLNRTQGTTSGTTNQSRLLFSQAGPQSMSLQARNWLPGPCYRQQRLSKTANDNNNSNFPWTAASKYHLNGRDSLVNPGPAMASHKDDEEKFFPMHGNLIFGKEGTTASNAELDNVMITDEEEIRTTNPVATEQYGTVANNLQSSNTAPTTRTVNDQGALPGMVWQDRDVYLQGPIWAKIPHTDGHFHPSPLMGGFGLKHPPPQIMIKNTPVPANPPTTFSPAKFASFITQYSTGQVSVEIEWELQKENSKRWNPEIQYTSNYNKSVNVDFTVDTNGVYSEPRPIGTRYLTRPL

SEQ ID NO: 44 - protein, 745 aa, Artificial Sequence
  NLS Peptide
MAADGYLPDWLEDNLSEGIREWWALQPGAPKPKANQQHQDNARGLVLPGYKYLGPGNGLDKGEPVNAADAAALEHDKAYDQQLKAGDNPYLKYNHADAEFQERLKEDTSFGGNLGRAVFQAKKRLLEPLGLVEEAAKTARAAKRPRTTPGKKRPVDQSPQEPDSSSGVGKSGKQPARKRLNFGQTGDSESVPDPQPLGEPPAAPTSLGSNTMASGGGAPMADNNEGADGVGNSSGNWHCDSQWLGDRVITTSTRTWALPTYNNHLYKQISSQSGASNDNHYFGYSTPWGYFDFNRFHCHFSPRDWQRLINNNWGFRPKKLSFKLFNIQVKEVTQNDGTTTIANNLTSTVQVFTDSEYQLPYVLGSAHQGCLPPFPADVFMVPQYGYLTLNNGSQAVGRSSFYCLEYFPSQMLRTGNNFQFSYTFEDVPFHSSYAHSQSLDRLMNPLIDQYLYYLNRTQGTTSGTTNQSRLLFSQAGPQSMSLQARNWLPGPCYRQQRLSKTANDNNNSNFPWTAASKYHLNGRDSLVNPGPAMASHKDDEEKFFPMHGNLIFGKEGTTASNAELDNVMITDEEEIRTTNPVATEQYGTVANNLQSSNTAPTTRTVNDQGALPGMVWQDRDVYLQGPIWAKIPHTDGHFHPSPLMGGFGLKHPPPQIMIKNTPVPANPPTTFSPAKFASFITQYSTGQVSVEIEWELQKENSKRWNPEIQYTSNYNKSVNVDFTVDTNGVYSEPRPIGTRYLTRPL

SEQ ID NO: 45 - protein, 747 aa, Artificial Sequence
  NLS Peptide
MAADGYLPDWLEDNLSEGIREWWALQPGAPKPKANQQHQDNARGLVLPGYKYLGPGNGLDKGEPVNAADAAALEHDKAYDQQLKAGDNPYLKYNHADAEFQERLKEDTSFGGNLGRAVFQAKKRLLEPLGLVEEAAKTAAAAKRSWSAAFPGKKRPVDQSPQEPDSSSGVGKSGKQPARKRLNFGQTGDSESVPDPQPLGEPPAAPTSLGSNTMASGGGAPMADNNEGADGVGNSSGNWHCDSQWLGDRVITTSTRTWALPTYNNHLYKQISSQSGASNDNHYFGYSTPWGYFDFNRFHCHFSPRDWQRLINNNWGFRPKKLSFKLFNIQVKEVTQNDGTTTIANNLTSTVQVFTDSEYQLPYVLGSAHQGCLPPFPADVFMVPQYGYLTLNNGSQAVGRSSFYCLEYFPSQMLRTGNNFQFSYTFEDVPFHSSYAHSQSLDRLMNPLIDQYLYYLNRTQGTTSGTTNQSRLLFSQAGPQSMSLQARNWLPGPCYRQQRLSKTANDNNNSNFPWTAASKYHLNGRDSLVNPGPAMASHKDDEEKFFPMHGNLIFGKEGTTASNAELDNVMITDEEEIRTTNPVATEQYGTVANNLQSSNTAPTTRTVNDQGALPGMVWQDRDVYLQGPIWAKIPHTDGHFHPSPLMGGFGLKHPPPQIMIKNTPVPANPPTTFSPAKFASFITQYSTGQVSVEIEWELQKENSKRWNPEIQYTSNYNKSVNVDFTVDTNGVYSEPRPIGTRYLTRPL

SEQ ID NO: 46 - protein, 745 aa, Artificial Sequence
  NLS Peptide
MAADGYLPDWLEDNLSEGIREWWALQPGAPKPKANQQHQDNARGLVLPGYKYLGPGNGLDKGEPVNAADAAALEHDKAYDQQLKAGDNPYLKYNHADAEFQERLKEDTSFGGNLGRAVFQAKKRLLEPLGLVEEAARTAPAAKRVKLDPGKKRPVDQSPQEPDSSSGVGKSGKQPARKRLNFGQTGDSESVPDPQPLGEPPAAPTSLGSNTMASGGGAPMADNNEGADGVGNSSGNWHCDSQWLGDRVITTSTRTWALPTYNNHLYKQISSQSGASNDNHYFGYSTPWGYFDFNRFHCHFSPRDWQRLINNNWGFRPKKLSFKLFNIQVKEVTQNDGTTTIANNLTSTVQVFTDSEYQLPYVLGSAHQGCLPPFPADVFMVPQYGYLTLNNGSQAVGRSSFYCLEYFPSQMLRTGNNFQFSYTFEDVPFHSSYAHSQSLDRLMNPLIDQYLYYLNRTQGTTSGTTNQSRLLFSQAGPQSMSLQARNWLPGPCYRQQRLSKTANDNNNSNFPWTAASKYHLNGRDSLVNPGPAMASHKDDEEKFFPMHGNLIFGKEGTTASNAELDNVMITDEEEIRTTNPVATEQYGTVANNLQSSNTAPTTRTVNDQGALPGMVWQDRDVYLQGPIWAKIPHTDGHFHPSPLMGGFGLKHPPPQIMIKNTPVPANPPTTFSPAKFASFITQYSTGQVSVEIEWELQKENSKRWNPEIQYTSNYNKSVNVDFTVDTNGVYSEPRPIGTRYLTRPL

SEQ ID NO: 47 - protein, 749 aa, Artificial Sequence
  Viral Peptide
MAADGYLPDWLEDNLSEGIREWWALQPGAPKPKAGLFDIIKKIAESFNQQHQDNARGLVLPGYKYLGPGNGLDKGEPVNAADAAALEHDKAYDQQLKAGDNPYLKYNHADAEFQERLKEDTSFGGNLGRAVFQAKKRLLEPLGLVEEAAKTAPGKKRPVDQSPQEPDSSSGVGKSGKQPARKRLNFGQTGDSESVPDPQPLGEPPAAPTSLGSNTMASGGGAPMADNNEGADGVGNSSGNWHCDSQWLGDRVITTSTRTWALPTYNNHLYKQISSQSGASNDNHYFGYSTPWGYFDFNRFHCHFSPRDWQRLINNNWGFRPKKLSFKLFNIQVKEVTQNDGTTTIANNLTSTVQVFTDSEYQLPYVLGSAHQGCLPPFPADVFMVPQYGYLTLNNGSQAVGRSSFYCLEYFPSQMLRTGNNFQFSYTFEDVPFHSSYAHSQSLDRLMNPLIDQYLYYLNRTQGTTSGTTNQSRLLFSQAGPQSMSLQARNWLPGPCYRQQRLSKTANDNNNSNFPWTAASKYHLNGRDSLVNPGPAMASHKDDEEKFFPMHGNLIFGKEGTTASNAELDNVMITDEEEIRTTNPVATEQYGTVANNLQSSNTAPTTRTVNDQGALPGMVWQDRDVYLQGPIWAKIPHTDGHFHPSPLMGGFGLKHPPPQIMIKNTPVPANPPTTFSPAKFASFITQYSTGQVSVEIEWELQKENSKRWNPEIQYTSNYNKSVNVDFTVDTNGVYSEPRPIGTRYLTRPL

SEQ ID NO: 48 - protein, 743 aa, Artificial Sequence
  Viral Peptide
MAADGYLPDWLEDNLSEGIREWWALQPGAPKPKAFFLIPKGNQQHQDNARGLVLPGYKYLGPGNGLDKGEPVNAADAAALEHDKAYDQQLKAGDNPYLKYNHADAEFQERLKEDTSFGGNLGRAVFQAKKRLLEPLGLVEEAAKTAPGKKRPVDQSPQEPDSSSGVGKSGKQPARKRLNFGQTGDSESVPDPQPLGEPPAAPTSLGSNTMASGGGAPMADNNEGADGVGNSSGNWHCDSQWLGDRVITTSTRTWALPTYNNHLYKQISSQSGASNDNHYFGYSTPWGYFDFNRFHCHFSPRDWQRLINNNWGFRPKKLSFKLFNIQVKEVTQNDGTTTIANNLTSTVQVFTDSEYQLPYVLGSAHQGCLPPFPADVFMVPQYGYLTLNNGSQAVGRSSFYCLEYFPSQMLRTGNNFQFSYTFEDVPFHSSYAHSQSLDRLMNPLIDQYLYYLNRTQGTTSGTTNQSRLLFSQAGPQSMSLQARNWLPGPCYRQQRLSKTANDNNNSNFPWTAASKYHLNGRDSLVNPGPAMASHKDDEEKFFPMHGNLIFGKEGTTASNAELDNVMITDEEEIRTTNPVATEQYGTVANNLQSSNTAPTTRTVNDQGALPGMVWQDRDVYLQGPIWAKIPHTDGHFHPSPLMGGFGLKHPPPQIMIKNTPVPANPPTTFSPAKFASFITQYSTGQVSVEIEWELQKENSKRWNPEIQYTSNYNKSVNVDFTVDTNGVYSEPRPIGTRYLTRPL

SEQ ID NO: 49 - protein, 763 aa, Artificial Sequence
  Viral Peptide
MAADGYLPDWLEDNLSEGIREWWALQPGAPKPKAGWTLNSAGYLLGKINLKALAALAKKILNQQHQDNARGLVLPGYKYLGPGNGLDKGEPVNAADAAALEHDKAYDQQLKAGDNPYLKYNHADAEFQERLKEDTSFGGNLGRAVFQAKKRLLEPLGLVEEAAKTAPGKKRPVDQSPQEPDSSSGVGKSGKQPARKRLNFGQTGDSESVPDPQPLGEPPAAPTSLGSNTMASGGGAPMADNNEGADGVGNSSGNWHCDSQWLGDRVITTSTRTWALPTYNNHLYKQISSQSGASNDNHYFGYSTPWGYFDFNRFHCHFSPRDWQRLINNNWGFRPKKLSFKLFNIQVKEVTQNDGTTTIANNLTSTVQVFTDSEYQLPYVLGSAHQGCLPPFPADVFMVPQYGYLTLNNGSQAVGRSSFYCLEYFPSQMLRTGNNFQFSYTFEDVPFHSSYAHSQSLDRLMNPLIDQYLYYLNRTQGTTSGTTNQSRLLFSQAGPQSMSLQARNWLPGPCYRQQRLSKTANDNNNSNFPWTAASKYHLNGRDSLVNPGPAMASHKDDEEKFFPMHGNLIFGKEGTTASNAELDNVMITDEEEIRTTNPVATEQYGTVANNLQSSNTAPTTRTVNDQGALPGMVWQDRDVYLQGPIWAKIPHTDGHFHPSPLMGGFGLKHPPPQIMIKNTPVPANPPTTFSPAKFASFITQYSTGQVSVEIEWELQKENSKRWNPEIQYTSNYNKSVNVDFTVDTNGVYSEPRPIGTRYLTRPL

SEQ ID NO: 50 - protein, 749 aa, Artificial Sequence
  Viral Peptide
MAADGYLPDWLEDNLSEGIREWWALQPGAPKPKAGRKKRRQRRRPPQNQQHQDNARGLVLPGYKYLGPGNGLDKGEPVNAADAAALEHDKAYDQQLKAGDNPYLKYNHADAEFQERLKEDTSFGGNLGRAVFQAKKRLLEPLGLVEEAAKTAPGKKRPVDQSPQEPDSSSGVGKSGKQPARKRLNFGQTGDSESVPDPQPLGEPPAAPTSLGSNTMASGGGAPMADNNEGADGVGNSSGNWHCDSQWLGDRVITTSTRTWALPTYNNHLYKQISSQSGASNDNHYFGYSTPWGYFDFNRFHCHFSPRDWQRLINNNWGFRPKKLSFKLFNIQVKEVTQNDGTTTIANNLTSTVQVFTDSEYQLPYVLGSAHQGCLPPFPADVFMVPQYGYLTLNNGSQAVGRSSFYCLEYFPSQMLRTGNNFQFSYTFEDVPFHSSYAHSQSLDRLMNPLIDQYLYYLNRTQGTTSGTTNQSRLLFSQAGPQSMSLQARNWLPGPCYRQQRLSKTANDNNNSNFPWTAASKYHLNGRDSLVNPGPAMASHKDDEEKFFPMHGNLIFGKEGTTASNAELDNVMITDEEEIRTTNPVATEQYGTVANNLQSSNTAPTTRTVNDQGALPGMVWQDRDVYLQGPIWAKIPHTDGHFHPSPLMGGFGLKHPPPQIMIKNTPVPANPPTTFSPAKFASFITQYSTGQVSVEIEWELQKENSKRWNPEIQYTSNYNKSVNVDFTVDTNGVYSEPRPIGTRYLTRPL

SEQ ID NO: 51 - protein, 751 aa, Artificial Sequence
  Viral Peptide
MAADGYLPDWLEDNLSEGIREWWALQPGAPKPKAKKAAAVLLPVLLAAPNQQHQDNARGLVLPGYKYLGPGNGLDKGEPVNAADAAALEHDKAYDQQLKAGDNPYLKYNHADAEFQERLKEDTSFGGNLGRAVFQAKKRLLEPLGLVEEAAKTAPGKKRPVDQSPQEPDSSSGVGKSGKQPARKRLNFGQTGDSESVPDPQPLGEPPAAPTSLGSNTMASGGGAPMADNNEGADGVGNSSGNWHCDSQWLGDRVITTSTRTWALPTYNNHLYKQISSQSGASNDNHYFGYSTPWGYFDFNRFHCHFSPRDWQRLINNNWGFRPKKLSFKLFNIQVKEVTQNDGTTTIANNLTSTVQVFTDSEYQLPYVLGSAHQGCLPPFPADVFMVPQYGYLTLNNGSQAVGRSSFYCLEYFPSQMLRTGNNFQFSYTFEDVPFHSSYAHSQSLDRLMNPLIDQYLYYLNRTQGTTSGTTNQSRLLFSQAGPQSMSLQARNWLPGPCYRQQRLSKTANDNNNSNFPWTAASKYHLNGRDSLVNPGPAMASHKDDEEKFFPMHGNLIFGKEGTTASNAELDNVMITDEEEIRTTNPVATEQYGTVANNLQSSNTAPTTRTVNDQGALPGMVWQDRDVYLQGPIWAKIPHTDGHFHPSPLMGGFGLKHPPPQIMIKNTPVPANPPTTFSPAKFASFITQYSTGQVSVEIEWELQKENSKRWNPEIQYTSNYNKSVNVDFTVDTNGVYSEPRPIGTRYLTRPL

SEQ ID NO: 52 - protein, 754 aa, Artificial Sequence
  Viral Peptide
MAADGYLPDWLEDNLSEGIREWWALQPGAPKPKARQIKIWFQNRRLKWKKGGNQQHQDNARGLVLPGYKYLGPGNGLDKGEPVNAADAAALEHDKAYDQQLKAGDNPYLKYNHADAEFQERLKEDTSFGGNLGRAVFQAKKRLLEPLGLVEEAAKTAPGKKRPVDQSPQEPDSSSGVGKSGKQPARKRLNFGQTGDSESVPDPQPLGEPPAAPTSLGSNTMASGGGAPMADNNEGADGVGNSSGNWHCDSQWLGDRVITTSTRTWALPTYNNHLYKQISSQSGASNDNHYFGYSTPWGYFDFNRFHCHFSPRDWQRLINNNWGFRPKKLSFKLFNIQVKEVTQNDGTTTIANNLTSTVQVFTDSEYQLPYVLGSAHQGCLPPFPADVFMVPQYGYLTLNNGSQAVGRSSFYCLEYFPSQMLRTGNNFQFSYTFEDVPFHSSYAHSQSLDRLMNPLIDQYLYYLNRTQGTTSGTTNQSRLLFSQAGPQSMSLQARNWLPGPCYRQQRLSKTANDNNNSNFPWTAASKYHLNGRDSLVNPGPAMASHKDDEEKFFPMHGNLIFGKEGTTASNAELDNVMITDEEEIRTTNPVATEQYGTVANNLQSSNTAPTTRTVNDQGALPGMVWQDRDVYLQGPIWAKIPHTDGHFHPSPLMGGFGLKHPPPQIMIKNTPVPANPPTTFSPAKFASFITQYSTGQVSVEIEWELQKENSKRWNPEIQYTSNYNKSVNVDFTVDTNGVYSEPRPIGTRYLTRPL

SEQ ID NO: 53 - protein, 752 aa, Artificial Sequence
  Viral Peptide
MAADGYLPDWLEDNLSEGIREWWALQPGAPKPKARRRRRRRRRRRRRRRRNQQHQDNARGLVLPGYKYLGPGNGLDKGEPVNAADAAALEHDKAYDQQLKAGDNPYLKYNHADAEFQERLKEDTSFGGNLGRAVFQAKKRLLEPLGLVEEAAKTAPGKKRPVDQSPQEPDSSSGVGKSGKQPARKRLNFGQTGDSESVPDPQPLGEPPAAPTSLGSNTMASGGGAPMADNNEGADGVGNSSGNWHCDSQWLGDRVITTSTRTWALPTYNNHLYKQISSQSGASNDNHYFGYSTPWGYFDFNRFHCHFSPRDWQRLINNNWGFRPKKLSFKLFNIQVKEVTQNDGTTTIANNLTSTVQVFTDSEYQLPYVLGSAHQGCLPPFPADVFMVPQYGYLTLNNGSQAVGRSSFYCLEYFPSQMLRTGNNFQFSYTFEDVPFHSSYAHSQSLDRLMNPLIDQYLYYLNRTQGTTSGTTNQSRLLFSQAGPQSMSLQARNWLPGPCYRQQRLSKTANDNNNSNFPWTAASKYHLNGRDSLVNPGPAMASHKDDEEKFFPMHGNLIFGKEGTTASNAELDNVMITDEEEIRTTNPVATEQYGTVANNLQSSNTAPTTRTVNDQGALPGMVWQDRDVYLQGPIWAKIPHTDGHFHPSPLMGGFGLKHPPPQIMIKNTPVPANPPTTFSPAKFASFITQYSTGQVSVEIEWELQKENSKRWNPEIQYTSNYNKSVNVDFTVDTNGVYSEPRPIGTRYLTRPL

SEQ ID NO: 54 - protein, 752 aa, Artificial Sequence
  Viral Peptide
MAADGYLPDWLEDNLSEGIREWWALQPGAPKPKAKKKKKKKKKKKKKKKKNQQHQDNARGLVLPGYKYLGPGNGLDKGEPVNAADAAALEHDKAYDQQLKAGDNPYLKYNHADAEFQERLKEDTSFGGNLGRAVFQAKKRLLEPLGLVEEAAKTAPGKKRPVDQSPQEPDSSSGVGKSGKQPARKRLNFGQTGDSESVPDPQPLGEPPAAPTSLGSNTMASGGGAPMADNNEGADGVGNSSGNWHCDSQWLGDRVITTSTRTWALPTYNNHLYKQISSQSGASNDNHYFGYSTPWGYFDFNRFHCHFSPRDWQRLINNNWGFRPKKLSFKLFNIQVKEVTQNDGTTTIANNLTSTVQVFTDSEYQLPYVLGSAHQGCLPPFPADVFMVPQYGYLTLNNGSQAVGRSSFYCLEYFPSQMLRTGNNFQFSYTFEDVPFHSSYAHSQSLDRLMNPLIDQYLYYLNRTQGTTSGTTNQSRLLFSQAGPQSMSLQARNWLPGPCYRQQRLSKTANDNNNSNFPWTAASKYHLNGRDSLVNPGPAMASHKDDEEKFFPMHGNLIFGKEGTTASNAELDNVMITDEEEIRTTNPVATEQYGTVANNLQSSNTAPTTRTVNDQGALPGMVWQDRDVYLQGPIWAKIPHTDGHFHPSPLMGGFGLKHPPPQIMIKNTPVPANPPTTFSPAKFASFITQYSTGQVSVEIEWELQKENSKRWNPEIQYTSNYNKSVNVDFTVDTNGVYSEPRPIGTRYLTRPL

SEQ ID NO: 55 - protein, 772 aa, Artificial Sequence
  Viral Peptide
MAADGYLPDWLEDNLSEGIREWWALQPGAPKPKARRRRRRRRRRRRRRRRLRVRLASHLRKLRKRLLRDANQQHQDNARGLVLPGYKYLGPGNGLDKGEPVNAADAAALEHDKAYDQQLKAGDNPYLKYNHADAEFQERLKEDTSFGGNLGRAVFQAKKRLLEPLGLVEEAAKTAPGKKRPVDQSPQEPDSSSGVGKSGKQPARKRLNFGQTGDSESVPDPQPLGEPPAAPTSLGSNTMASGGGAPMADNNEGADGVGNSSGNWHCDSQWLGDRVITTSTRTWALPTYNNHLYKQISSQSGASNDNHYFGYSTPWGYFDFNRFHCHFSPRDWQRLINNNWGFRPKKLSFKLFNIQVKEVTQNDGTTTIANNLTSTVQVFTDSEYQLPYVLGSAHQGCLPPFPADVFMVPQYGYLTLNNGSQAVGRSSFYCLEYFPSQMLRTGNNFQFSYTFEDVPFHSSYAHSQSLDRLMNPLIDQYLYYLNRTQGTTSGTTNQSRLLFSQAGPQSMSLQARNWLPGPCYRQQRLSKTANDNNNSNFPWTAASKYHLNGRDSLVNPGPAMASHKDDEEKFFPMHGNLIFGKEGTTASNAELDNVMITDEEEIRTTNPVATEQYGTVANNLQSSNTAPTTRTVNDQGALPGMVWQDRDVYLQGPIWAKIPHTDGHFHPSPLMGGFGLKHPPPQIMIKNTPVPANPPTTFSPAKFASFITQYSTGQVSVEIEWELQKENSKRWNPEIQYTSNYNKSVNVDFTVDTNGVYSEPRPIGTRYLTRPL

SEQ ID NO: 56 - protein, 745 aa, Artificial Sequence
  Viral Peptide
MAADGYLPDWLEDNLSEGIREWWALQPGAPKPKANQQHQDNARGLVLPGYKYLGPGNGLDKGEPVNAADAAALEHDKAYDQQLKAGDNPYLKYNHADAEFQERLKEDTSFGGNLGRAVFQAKKRLLEPLGLVEEAAKTAPAAKRVKLDPGKKRPVDQSPQEPDSSSGVGKSGKQPARKRLNFGQTGDSESVPDPQPLGEPPAAPTSLGSNTMASGGGAPMADNNEGADGVGNSSGNWHCDSQWLGDRVITTSTRTWALPTYNNHLYKQISSQSGASNDNHYFGYSTPWGYFDFNRFHCHFSPRDWQRLINNNWGFRPKKLSFKLFNIQVKEVTQNDGTTTIANNLTSTVQVFTDSEYQLPYVLGSAHQGCLPPFPADVFMVPQYGYLTLNNGSQAVGRSSFYCLEYFPSQMLRTGNNFQFSYTFEDVPFHSSYAHSQSLDRLMNPLIDQYLYYLNRTQGTTSGTTNQSRLLFSQAGPQSMSLQARNWLPGPCYRQQRLSKTANDNNNSNFPWTAASKYHLNGRDSAVNPGPAMASHKDDEEKFFPMHGNLIFGKEGTTASNAELDNVMITDEEEIRTTNPVATEQYGTVANNLQSSNTAPTTRTVNDQGALPGMVWQDRDVYLQGPIWAKIPHTDGHFHPSPLMGGFGLKHPPPQIMIKNTPVPANPPTTFSPAKFASFITQYSTGQVSVEIEWELQKENSKRWNPEIQYTSNYNKSVNVDFTVDTNGVYSEPRPIGTRYLTRPL

SEQ ID NO: 57 - protein, 763 aa, Artificial Sequence
  NLS Peptide
MAADGYLPDWLEDNLSEGIREWWALQPGAPKPKANQQHQDNARGLVLPGYKYLGPGNGLDKGEPVNAADAAALEHDKAYDQQLKAGDNPYLKYNHADAEFQERLKEDTSFGGNLGRAVFQAKKRLLEPLGLVEEAAKTAYGDYSNQQSGYGKVSRRGGHQNSYKPYPGKKRPVDQSPQEPDSSSGVGKSGKQPARKRLNFGQTGDSESVPDPQPLGEPPAAPTSLGSNTMASGGGAPMADNNEGADGVGNSSGNWHCDSQWLGDRVITTSTRTWALPTYNNHLYKQISSQSGASNDNHYFGYSTPWGYFDFNRFHCHFSPRDWQRLINNNWGFRPKKLSFKLFNIQVKEVTQNDGTTTIANNLTSTVQVFTDSEYQLPYVLGSAHQGCLPPFPADVFMVPQYGYLTLNNGSQAVGRSSFYCLEYFPSQMLRTGNNFQFSYTFEDVPFHSSYAHSQSLDRLMNPLIDQYLYYLNRTQGTTSGTTNQSRLLFSQAGPQSMSLQARNWLPGPCYRQQRLSKTANDNNNSNFPWTAASKYHLNGRDSAVNPGPAMASHKDDEEKFFPMHGNLIFGKEGTTASNAELDNVMITDEEEIRTTNPVATEQYGTVANNLQSSNTAPTTRTVNDQGALPGMVWQDRDVYLQGPIWAKIPHTDGHFHPSPLMGGFGLKHPPPQIMIKNTPVPANPPTTFSPAKFASFITQYSTGQVSVEIEWELQKENSKRWNPEIQYTSNYNKSVNVDFTVDTNGVYSEPRPIGTRYLTRPL

SEQ ID NO: 58 - protein, 747 aa, Artificial Sequence
  NLS Peptide
MAADGYLPDWLEDNLSEGIREWWALQPGAPKPKANQQHQDNARGLVLPGYKYLGPGNGLDKGEPVNAADAAALEHDKAYDQQLKAGDNPYLKYNHADAEFQERLKEDTSFGGNLGRAVFQAKKRLLEPLGLVEEAAKTAAAAKRSWSAAFPGKKRPVDQSPQEPDSSSGVGKSGKQPARKRLNFGQTGDSESVPDPQPLGEPPAAPTSLGSNTMASGGGAPMADNNEGADGVGNSSGNWHCDSQWLGDRVITTSTRTWALPTYNNHLYKQISSQSGASNDNHYFGYSTPWGYFDFNRFHCHFSPRDWQRLINNNWGFRPKKLSFKLFNIQVKEVTQNDGTTTIANNLTSTVQVFTDSEYQLPYVLGSAHQGCLPPFPADVFMVPQYGYLTLNNGSQAVGRSSFYCLEYFPSQMLRTGNNFQFSYTFEDVPFHSSYAHSQSLDRLMNPLIDQYLYYLNRTQGTTSGTTNQSRLLFSQAGPQSMSLQARNWLPGPCYRQQRLSKTANDNNNSNFPWTAASKYHLNGRDSAVNPGPAMASHKDDEEKFFPMHGNLIFGKEGTTASNAELDNVMITDEEEIRTTNPVATEQYGTVANNLQSSNTAPTTRTVNDQGALPGMVWQDRDVYLQGPIWAKIPHTDGHFHPSPLMGGFGLKHPPPQIMIKNTPVPANPPTTFSPAKFASFITQYSTGQVSVEIEWELQKENSKRWNPEIQYTSNYNKSVNVDFTVDTNGVYSEPRPIGTRYLTRPL

SEQ ID NO: 59 - protein, 738 aa, Artificial Sequence
  Viral Peptide
MAADGYLPDWLEDNLSEGIREWWDLKPGAPKPKANQQKQDNGRGLVLPGYKYLGPFNGLDKGEPVNAADAAALEHDKAYDQQLQAGDNPYLRYNHADAEFQERLQEDTSFGGNLGRAVFQAKKRVLEPLGLVESPVKTAPGKKRPVEPSPQRSPDSSTGIGKKGQQPAKKRLNFGQTGDSESVPDPQPIGEPPAAPSGVGPNTMAAGGGAPMADNNEGADGVGSSSGNWHCDSTWLGDRVITTSTRTWALPTYNNHLYKQISNGTSGGSTNDNTYFGYSTPWGYFDFNRFHCHFSPRDWQRLINNNWGFRPKRLNFKLFNIQVKEVTQNEGTKTIANNLTSTIQVFTDSEYQLPYVLGSAHQGCLPPFPADVFMIPQYGYLTLNNGSQAVGRSSFYCLEYFPSQMLRTGNNFEFSYNFEDVPFHSSYAHSQSLDRLMNPLIDQYLYYLSRTQSTGGTAGTQQLLFSQAGPNNMSAQAKNWLPGPCYRQQRVSTTLSQNNNSNFAWTGATKYHLNGRDSLVNPGVAMATHKDDEERFFPSSGVLMFGKQGAGKDNVDYSSVMLTSEEEIKTTNPVATEQYGVVADNLQQQNAAPIVGAVNSQGALPGMVWQNRDVYLQGPIWAKIPHTDGNFHPSPLMGGFGLKHPPPQILIKNTPVPADPPTTFNQAKLASFITQYSTGQVSVEIEWELQKENSKRWNPEIQYTSNYYKSTNVDFAVNTEGTYSEPRPIGTRYLTRNL

SEQ ID NO: 60 - protein, 738 aa, Artificial Sequence
  Viral Peptide
MAADGYLPDWLEDNLSEGIREWWDLKPGAPKPKANQQKQDNGRGLVLPGYKYLGPFNGLDKGEPVNAADAAALEHDKAYDQQLQAGDNPYLRYNHADAEFQERLQEDTSFGGNLGRAVFQAKKRVLEPLGLVESPVRTAPGKKRPVEPSPQRSPDSSTGIGKKGQQPAKKRLNFGQTGDSESVPDPQPIGEPPAAPSGVGPNTMAAGGGAPMADNNEGADGVGSSSGNWHCDSTWLGDRVITTSTRTWALPTYNNHLYKQISNGTSGGSTNDNTYFGYSTPWGYFDFNRFHCHFSPRDWQRLINNNWGFRPKRLNFKLFNIQVKEVTQNEGTKTIANNLTSTIQVFTDSEYQLPYVLGSAHQGCLPPFPADVFMIPQYGYLTLNNGSQAVGRSSFYCLEYFPSQMLRTGNNFEFSYNFEDVPFHSSYAHSQSLDRLMNPLIDQYLYYLSRTQSTGGTAGTQQLLFSQAGPNNMSAQAKNWLPGPCYRQQRVSTTLSQNNNSNFAWTGATKYHLNGRDSLVNPGVAMATHKDDEERFFPSSGVLMFGKQGAGKDNVDYSSVMLTSEEEIKTTNPVATEQYGVVADNLQQQNAAPIVGAVNSQGALPGMVWQNRDVYLQGPIWAKIPHTDGNFHPSPLMGGFGLKHPPPQILIKNTPVPADPPTTFNQAKLASFITQYSTGQVSVEIEWELQKENSKRWNPEIQYTSNYYKSTNVDFAVNTEGTYSEPRPIGTRYLTRNL

SEQ ID NO: 61 - protein, 738 aa, Artificial Sequence
  Viral Peptide
MAADGYLPDWLEDNLSEGIREWWDLKPGAPKPKANQQKQDNGRGLVLPGYKYLGPFNGLDKGEPVNAADAAALEHDKAYDQQLQAGDNPYLRYNHADAEFQERLQEDTSFGGNLGRAVFQAKKRVLEPLGLVESPVKTAPGKKRPVEPSPQRSPDSSTGIGKKGQQPAKKRLNFGQTGDSESVPDPQPIGEPPAAPSGVGPNTMAAGGGAPMADNNEGADGVGSSSGNWHCDSTWLGDRVITTSTRTWALPTYNNHLYKQISNGTSGGSTNDNTYFGYSTPWGYFDFNRFHCHFSPRDWQRLINNNWGFRPKRLNFKLFNIQVKEVTQNEGTKTIANNLTSTIQVFTDSEYQLPYVLGSAHQGCLPPFPADVFMIPQYGYLTLNNGSQAVGRSSFYCLEYFPSQMLRTGNNFEFSYNFEDVPFHSSYAHSQSLDRLMNPLIDQYLYYLSRTQSTGGTAGTQQLLFSQAGPNNMSAQAKNWLPGPCYRQQRVSTTLSQNNNSNFAWTGATKYHLNGRDSAVNPGVAMATHKDDEERFFPSSGVLMFGKQGAGKDNVDYSSVMLTSEEEIKTTNPVATEQYGVVADNLQQQNAAPIVGAVNSQGALPGMVWQNRDVYLQGPIWAKIPHTDGNFHPSPLMGGFGLKHPPPQILIKNTPVPADPPTTFNQAKLASFITQYSTGQVSVEIEWELQKENSKRWNPEIQYTSNYYKSTNVDFAVNTEGTYSEPRPIGTRYLTRNL

SEQ ID NO: 62 - protein, 747 aa, Artificial Sequence
  NLS Peptide
MAADGYLPDWLEDNLSEGIREWWDLKPGAPKPKANQQKQDNGRGLVLPGYKYLGPFNGLDKGEPVNAADAAALEHDKAYDQQLQAGDNPYLRYNHADAEFQERLQEDTSFGGNLGRAVFQAKKRVLEPLGLVESPVKTAPAAKRVKLDPGKKRPVEPSPQRSPDSSTGIGKKGQQPAKKRLNFGQTGDSESVPDPQPIGEPPAAPSGVGPNTMAAGGGAPMADNNEGADGVGSSSGNWHCDSTWLGDRVITTSTRTWALPTYNNHLYKQISNGTSGGSTNDNTYFGYSTPWGYFDFNRFHCHFSPRDWQRLINNNWGFRPKRLNFKLFNIQVKEVTQNEGTKTIANNLTSTIQVFTDSEYQLPYVLGSAHQGCLPPFPADVFMIPQYGYLTLNNGSQAVGRSSFYCLEYFPSQMLRTGNNFEFSYNFEDVPFHSSYAHSQSLDRLMNPLIDQYLYYLSRTQSTGGTAGTQQLLFSQAGPNNMSAQAKNWLPGPCYRQQRVSTTLSQNNNSNFAWTGATKYHLNGRDSLVNPGVAMATHKDDEERFFPSSGVLMFGKQGAGKDNVDYSSVMLTSEEEIKTTNPVATEQYGVVADNLQQQNAAPIVGAVNSQGALPGMVWQNRDVYLQGPIWAKIPHTDGNFHPSPLMGGFGLKHPPPQILIKNTPVPADPPTTFNQAKLASFITQYSTGQVSVEIEWELQKENSKRWNPEIQYTSNYYKSTNVDFAVNTEGTYSEPRPIGTRYLTRNL

SEQ ID NO: 63 - protein, 765 aa, Artificial Sequence
  NLS Peptide
MAADGYLPDWLEDNLSEGIREWWDLKPGAPKPKANQQKQDNGRGLVLPGYKYLGPFNGLDKGEPVNAADAAALEHDKAYDQQLQAGDNPYLRYNHADAEFQERLQEDTSFGGNLGRAVFQAKKRVLEPLGLVESPVKTAYGDYSNQQSGYGKVSRRGGHQNSYKPYPGKKRPVEPSPQRSPDSSTGIGKKGQQPAKKRLNFGQTGDSESVPDPQPIGEPPAAPSGVGPNTMAAGGGAPMADNNEGADGVGSSSGNWHCDSTWLGDRVITTSTRTWALPTYNNHLYKQISNGTSGGSTNDNTYFGYSTPWGYFDFNRFHCHFSPRDWQRLINNNWGFRPKRLNFKLFNIQVKEVTQNEGTKTIANNLTSTIQVFTDSEYQLPYVLGSAHQGCLPPFPADVFMIPQYGYLTLNNGSQAVGRSSFYCLEYFPSQMLRTGNNFEFSYNFEDVPFHSSYAHSQSLDRLMNPLIDQYLYYLSRTQSTGGTAGTQQLLFSQAGPNNMSAQAKNWLPGPCYRQQRVSTTLSQNNNSNFAWTGATKYHLNGRDSLVNPGVAMATHKDDEERFFPSSGVLMFGKQGAGKDNVDYSSVMLTSEEEIKTTNPVATEQYGVVADNLQQQNAAPIVGAVNSQGALPGMVWQNRDVYLQGPIWAKIPHTDGNFHPSPLMGGFGLKHPPPQILIKNTPVPADPPTTFNQAKLASFITQYSTGQVSVEIEWELQKENSKRWNPEIQYTSNYYKSTNVDFAVNTEGTYSEPRPIGTRYLTRNL

SEQ ID NO: 64 - protein, 749 aa, Artificial Sequence
  NLS Peptide
MAADGYLPDWLEDNLSEGIREWWDLKPGAPKPKANQQKQDNGRGLVLPGYKYLGPFNGLDKGEPVNAADAAALEHDKAYDQQLQAGDNPYLRYNHADAEFQERLQEDTSFGGNLGRAVFQAKKRVLEPLGLVESPVKTAAAAKRSWSAAFPGKKRPVEPSPQRSPDSSTGIGKKGQQPAKKRLNFGQTGDSESVPDPQPIGEPPAAPSGVGPNTMAAGGGAPMADNNEGADGVGSSSGNWHCDSTWLGDRVITTSTRTWALPTYNNHLYKQISNGTSGGSTNDNTYFGYSTPWGYFDFNRFHCHFSPRDWQRLINNNWGFRPKRLNFKLFNIQVKEVTQNEGTKTIANNLTSTIQVFTDSEYQLPYVLGSAHQGCLPPFPADVFMIPQYGYLTLNNGSQAVGRSSFYCLEYFPSQMLRTGNNFEFSYNFEDVPFHSSYAHSQSLDRLMNPLIDQYLYYLSRTQSTGGTAGTQQLLFSQAGPNNMSAQAKNWLPGPCYRQQRVSTTLSQNNNSNFAWTGATKYHLNGRDSLVNPGVAMATHKDDEERFFPSSGVLMFGKQGAGKDNVDYSSVMLTSEEEIKTTNPVATEQYGVVADNLQQQNAAPIVGAVNSQGALPGMVWQNRDVYLQGPIWAKIPHTDGNFHPSPLMGGFGLKHPPPQILIKNTPVPADPPTTFNQAKLASFITQYSTGQVSVEIEWELQKENSKRWNPEIQYTSNYYKSTNVDFAVNTEGTYSEPRPIGTRYLTRNL

SEQ ID NO: 65 - protein, 745 aa, Artificial Sequence
  NLS Peptide
MAADGYLPDWLEDNLSEGIREWWDLKPGAPKPKANQQKQDNGRGLVLPGYKYLGPFNGLDKGEPVNAADAAALEHDKAYDQQLQAGDNPYLRYNHADAEFQERLQEDTSFGGNLGRAVFQAKKRVLEPLGLVESPVKTAPKKKRKVPGKKRPVEPSPQRSPDSSTGIGKKGQQPAKKRLNFGQTGDSESVPDPQPIGEPPAAPSGVGPNTMAAGGGAPMADNNEGADGVGSSSGNWHCDSTWLGDRVITTSTRTWALPTYNNHLYKQISNGTSGGSTNDNTYFGYSTPWGYFDFNRFHCHFSPRDWQRLINNNWGFRPKRLNFKLFNIQVKEVTQNEGTKTIANNLTSTIQVFTDSEYQLPYVLGSAHQGCLPPFPADVFMIPQYGYLTLNNGSQAVGRSSFYCLEYFPSQMLRTGNNFEFSYNFEDVPFHSSYAHSQSLDRLMNPLIDQYLYYLSRTQSTGGTAGTQQLLFSQAGPNNMSAQAKNWLPGPCYRQQRVSTTLSQNNNSNFAWTGATKYHLNGRDSLVNPGVAMATHKDDEERFFPSSGVLMFGKQGAGKDNVDYSSVMLTSEEEIKTTNPVATEQYGVVADNLQQQNAAPIVGAVNSQGALPGMVWQNRDVYLQGPIWAKIPHTDGNFHPSPLMGGFGLKHPPPQILIKNTPVPADPPTTFNQAKLASFITQYSTGQVSVEIEWELQKENSKRWNPEIQYTSNYYKSTNVDFAVNTEGTYSEPRPIGTRYLTRNL

SEQ ID NO: 66 - protein, 758 aa, Artificial Sequence
  NLS Peptide
MAADGYLPDWLEDNLSEGIREWWDLKPGAPKPKANQQKQDNGRGLVLPGYKYLGPFNGLDKGEPVNAADAAALEHDKAYDQQLQAGDNPYLRYNHADAEFQERLQEDTSFGGNLGRAVFQAKKRVLEPLGLVESPVKTAPAAKRVKLDEDPAAKRVKLDPGKKRPVEPSPQRSPDSSTGIGKKGQQPAKKRLNFGQTGDSESVPDPQPIGEPPAAPSGVGPNTMAAGGGAPMADNNEGADGVGSSSGNWHCDSTWLGDRVITTSTRTWALPTYNNHLYKQISNGTSGGSTNDNTYFGYSTPWGYFDFNRFHCHFSPRDWQRLINNNWGFRPKRLNFKLFNIQVKEVTQNEGTKTIANNLTSTIQVFTDSEYQLPYVLGSAHQGCLPPFPADVFMIPQYGYLTLNNGSQAVGRSSFYCLEYFPSQMLRTGNNFEFSYNFEDVPFHSSYAHSQSLDRLMNPLIDQYLYYLSRTQSTGGTAGTQQLLFSQAGPNNMSAQAKNWLPGPCYRQQRVSTTLSQNNNSNFAWTGATKYHLNGRDSLVNPGVAMATHKDDEERFFPSSGVLMFGKQGAGKDNVDYSSVMLTSEEEIKTTNPVATEQYGVVADNLQQQNAAPIVGAVNSQGALPGMVWQNRDVYLQGPIWAKIPHTDGNFHPSPLMGGFGLKHPPPQILIKNTPVPADPPTTFNQAKLASFITQYSTGQVSVEIEWELQKENSKRWNPEIQYTSNYYKSTNVDFAVNTEGTYSEPRPIGTRYLTRNL

SEQ ID NO: 67 - protein, 762 aa, Artificial Sequence
  NLS Peptide
MAADGYLPDWLEDNLSEGIREWWDLKPGAPKPKANQQKQDNGRGLVLPGYKYLGPFNGLDKGEPVNAADAAALEHDKAYDQQLQAGDNPYLRYNHADAEFQERLQEDTSFGGNLGRAVFQAKKRVLEPLGLVESPVKTAAAAKRSWSAAFEDAAAKRSWSAAFPGKKRPVEPSPQRSPDSSTGIGKKGQQPAKKRLNFGQTGDSESVPDPQPIGEPPAAPSGVGPNTMAAGGGAPMADNNEGADGVGSSSGNWHCDSTWLGDRVITTSTRTWALPTYNNHLYKQISNGTSGGSTNDNTYFGYSTPWGYFDFNRFHCHFSPRDWQRLINNNWGFRPKRLNFKLFNIQVKEVTQNEGTKTIANNLTSTIQVFTDSEYQLPYVLGSAHQGCLPPFPADVFMIPQYGYLTLNNGSQAVGRSSFYCLEYFPSQMLRTGNNFEFSYNFEDVPFHSSYAHSQSLDRLMNPLIDQYLYYLSRTQSTGGTAGTQQLLFSQAGPNNMSAQAKNWLPGPCYRQQRVSTTLSQNNNSNFAWTGATKYHLNGRDSLVNPGVAMATHKDDEERFFPSSGVLMFGKQGAGKDNVDYSSVMLTSEEEIKTTNPVATEQYGVVADNLQQQNAAPIVGAVNSQGALPGMVWQNRDVYLQGPIWAKIPHTDGNFHPSPLMGGFGLKHPPPQILIKNTPVPADPPTTFNQAKLASFITQYSTGQVSVEIEWELQKENSKRWNPEIQYTSNYYKSTNVDFAVNTEGTYSEPRPIGTRYLTRNL

SEQ ID NO: 68 - protein, 754 aa, Artificial Sequence
  NLS Peptide
MAADGYLPDWLEDNLSEGIREWWDLKPGAPKPKANQQKQDNGRGLVLPGYKYLGPFNGLDKGEPVNAADAAALEHDKAYDQQLQAGDNPYLRYNHADAEFQERLQEDTSFGGNLGRAVFQAKKRVLEPLGLVESPVKTAPKKKRKVEDPKKKRKVPGKKRPVEPSPQRSPDSSTGIGKKGQQPAKKRLNFGQTGDSESVPDPQPIGEPPAAPSGVGPNTMAAGGGAPMADNNEGADGVGSSSGNWHCDSTWLGDRVITTSTRTWALPTYNNHLYKQISNGTSGGSTNDNTYFGYSTPWGYFDFNRFHCHFSPRDWQRLINNNWGFRPKRLNFKLFNIQVKEVTQNEGTKTIANNLTSTIQVFTDSEYQLPYVLGSAHQGCLPPFPADVFMIPQYGYLTLNNGSQAVGRSSFYCLEYFPSQMLRTGNNFEFSYNFEDVPFHSSYAHSQSLDRLMNPLIDQYLYYLSRTQSTGGTAGTQQLLFSQAGPNNMSAQAKNWLPGPCYRQQRVSTTLSQNNNSNFAWTGATKYHLNGRDSLVNPGVAMATHKDDEERFFPSSGVLMFGKQGAGKDNVDYSSVMLTSEEEIKTTNPVATEQYGVVADNLQQQNAAPIVGAVNSQGALPGMVWQNRDVYLQGPIWAKIPHTDGNFHPSPLMGGFGLKHPPPQILIKNTPVPADPPTTFNQAKLASFITQYSTGQVSVEIEWELQKENSKRWNPEIQYTSNYYKSTNVDFAVNTEGTYSEPRPIGTRYLTRNL

SEQ ID NO: 69 - protein, 760 aa, Artificial Sequence
  NLS Peptide
MAADGYLPDWLEDNLSEGIREWWDLKPGAPKPKANQQKQDNGRGLVLPGYKYLGPFNGLDKGEPVNAADAAALEHDKAYDQQLQAGDNPYLRYNHADAEFQERLQEDTSFGGNLGRAVFQAKKRVLEPLGLVESPVKTAAAAKRSWSAAFEDPAAKRVKLDPGKKRPVEPSPQRSPDSSTGIGKKGQQPAKKRLNFGQTGDSESVPDPQPIGEPPAAPSGVGPNTMAAGGGAPMADNNEGADGVGSSSGNWHCDSTWLGDRVITTSTRTWALPTYNNHLYKQISNGTSGGSTNDNTYFGYSTPWGYFDFNRFHCHFSPRDWQRLINNNWGFRPKRLNFKLFNIQVKEVTQNEGTKTIANNLTSTIQVFTDSEYQLPYVLGSAHQGCLPPFPADVFMIPQYGYLTLNNGSQAVGRSSFYCLEYFPSQMLRTGNNFEFSYNFEDVPFHSSYAHSQSLDRLMNPLIDQYLYYLSRTQSTGGTAGTQQLLFSQAGPNNMSAQAKNWLPGPCYRQQRVSTTLSQNNNSNFAWTGATKYHLNGRDSLVNPGVAMATHKDDEERFFPSSGVLMFGKQGAGKDNVDYSSVMLTSEEEIKTTNPVATEQYGVVADNLQQQNAAPIVGAVNSQGALPGMVWQNRDVYLQGPIWAKIPHTDGNFHPSPLMGGFGLKHPPPQILIKNTPVPADPPTTFNQAKLASFITQYSTGQVSVEIEWELQKENSKRWNPEIQYTSNYYKSTNVDFAVNTEGTYSEPRPIGTRYLTRNL

SEQ ID NO: 70 - protein, 760 aa, Artificial Sequence
  NLS Peptide
MAADGYLPDWLEDNLSEGIREWWDLKPGAPKPKANQQKQDNGRGLVLPGYKYLGPFNGLDKGEPVNAADAAALEHDKAYDQQLQAGDNPYLRYNHADAEFQERLQEDTSFGGNLGRAVFQAKKRVLEPLGLVESPVKTAPAAKRVKLDEDAAAKRSWSAAFPGKKRPVEPSPQRSPDSSTGIGKKGQQPAKKRLNFGQTGDSESVPDPQPIGEPPAAPSGVGPNTMAAGGGAPMADNNEGADGVGSSSGNWHCDSTWLGDRVITTSTRTWALPTYNNHLYKQISNGTSGGSTNDNTYFGYSTPWGYFDFNRFHCHFSPRDWQRLINNNWGFRPKRLNFKLFNIQVKEVTQNEGTKTIANNLTSTIQVFTDSEYQLPYVLGSAHQGCLPPFPADVFMIPQYGYLTLNNGSQAVGRSSFYCLEYFPSQMLRTGNNFEFSYNFEDVPFHSSYAHSQSLDRLMNPLIDQYLYYLSRTQSTGGTAGTQQLLFSQAGPNNMSAQAKNWLPGPCYRQQRVSTTLSQNNNSNFAWTGATKYHLNGRDSLVNPGVAMATHKDDEERFFPSSGVLMFGKQGAGKDNVDYSSVMLTSEEEIKTTNPVATEQYGVVADNLQQQNAAPIVGAVNSQGALPGMVWQNRDVYLQGPIWAKIPHTDGNFHPSPLMGGFGLKHPPPQILIKNTPVPADPPTTFNQAKLASFITQYSTGQVSVEIEWELQKENSKRWNPEIQYTSNYYKSTNVDFAVNTEGTYSEPRPIGTRYLTRNL

SEQ ID NO: 71 - protein, 763 aa, Artificial Sequence
  NLS Peptide
MAADGYLPDWLEDNLSEGIREWWDLKPGAPKPKANQQKQDNGRGLVLPGYKYLGPFNGLDKGEPVNAADAAALEHDKAYDQQLQAGDNPYLRYNHADAEFQERLQEDTSFGGNLGRAVFQAKKRVLEPLGLVESPVKTAPKKKRKVEDPKKKRKVEDPKKKRKVPGKKRPVEPSPQRSPDSSTGIGKKGQQPAKKRLNFGQTGDSESVPDPQPIGEPPAAPSGVGPNTMAAGGGAPMADNNEGADGVGSSSGNWHCDSTWLGDRVITTSTRTWALPTYNNHLYKQISNGTSGGSTNDNTYFGYSTPWGYFDFNRFHCHFSPRDWQRLINNNWGFRPKRLNFKLFNIQVKEVTQNEGTKTIANNLTSTIQVFTDSEYQLPYVLGSAHQGCLPPFPADVFMIPQYGYLTLNNGSQAVGRSSFYCLEYFPSQMLRTGNNFEFSYNFEDVPFHSSYAHSQSLDRLMNPLIDQYLYYLSRTQSTGGTAGTQQLLFSQAGPNNMSAQAKNWLPGPCYRQQRVSTTLSQNNNSNFAWTGATKYHLNGRDSLVNPGVAMATHKDDEERFFPSSGVLMFGKQGAGKDNVDYSSVMLTSEEEIKTTNPVATEQYGVVADNLQQQNAAPIVGAVNSQGALPGMVWQNRDVYLQGPIWAKIPHTDGNFHPSPLMGGFGLKHPPPQILIKNTPVPADPPTTFNQAKLASFITQYSTGQVSVEIEWELQKENSKRWNPEIQYTSNYYKSTNVDFAVNTEGTYSEPRPIGTRYLTRNL

SEQ ID NO: 72 - protein, 769 aa, Artificial Sequence
  NLS Peptide
MAADGYLPDWLEDNLSEGIREWWDLKPGAPKPKANQQKQDNGRGLVLPGYKYLGPFNGLDKGEPVNAADAAALEHDKAYDQQLQAGDNPYLRYNHADAEFQERLQEDTSFGGNLGRAVFQAKKRVLEPLGLVESPVKTAPAAKRVKLDEDPAAKRVKLDEDPAAKRVKLDPGKKRPVEPSPQRSPDSSTGIGKKGQQPAKKRLNFGQTGDSESVPDPQPIGEPPAAPSGVGPNTMAAGGGAPMADNNEGADGVGSSSGNWHCDSTWLGDRVITTSTRTWALPTYNNHLYKQISNGTSGGSTNDNTYFGYSTPWGYFDFNRFHCHFSPRDWQRLINNNWGFRPKRLNFKLFNIQVKEVTQNEGTKTIANNLTSTIQVFTDSEYQLPYVLGSAHQGCLPPFPADVFMIPQYGYLTLNNGSQAVGRSSFYCLEYFPSQMLRTGNNFEFSYNFEDVPFHSSYAHSQSLDRLMNPLIDQYLYYLSRTQSTGGTAGTQQLLFSQAGPNNMSAQAKNWLPGPCYRQQRVSTTLSQNNNSNFAWTGATKYHLNGRDSLVNPGVAMATHKDDEERFFPSSGVLMFGKQGAGKDNVDYSSVMLTSEEEIKTTNPVATEQYGVVADNLQQQNAAPIVGAVNSQGALPGMVWQNRDVYLQGPIWAKIPHTDGNFHPSPLMGGFGLKHPPPQILIKNTPVPADPPTTFNQAKLASFITQYSTGQVSVEIEWELQKENSKRWNPEIQYTSNYYKSTNVDFAVNTEGTYSEPRPIGTRYLTRNL

SEQ ID NO: 73 - protein, 775 aa, Artificial Sequence
  NLS Peptide
MAADGYLPDWLEDNLSEGIREWWDLKPGAPKPKANQQKQDNGRGLVLPGYKYLGPFNGLDKGEPVNAADAAALEHDKAYDQQLQAGDNPYLRYNHADAEFQERLQEDTSFGGNLGRAVFQAKKRVLEPLGLVESPVKTAAAAKRSWSAAFEDAAAKASWSAAFEDAAAKRSWSAAFPGKKRPVEPSPQRSPDSSTGIGKKGQQPAKKRLNFGQTGDSESVPDPQPIGEPPAAPSGVGPNTMAAGGGAPMADNNEGADGVGSSSGNWHCDSTWLGDRVITTSTRTWALPTYNNHLYKQISNGTSGGSTNDNTYFGYSTPWGYFDFNRFHCHFSPRDWQRLINNNWGFRPKRLNFKLFNIQVKEVTQNEGTKTIANNLTSTIQVFTDSEYQLPYVLGSAHQGCLPPFPADVFMIPQYGYLTLNNGSQAVGRSSFYCLEYFPSQMLRTGNNFEFSYNFEDVPFHSSYAHSQSLDRLMNPLIDQYLYYLSRTQSTGGTAGTQQLLFSQAGPNNMSAQAKNWLPGPCYRQQRVSTTLSQNNNSNFAWTGATKYHLNGRDSLVNPGVAMATHKDDEERFFPSSGVLMFGKQGAGKDNVDYSSVMLTSEEEIKTTNPVATEQYGVVADNLQQQNAAPIVGAVNSQGALPGMVWQNRDVYLQGPIWAKIPHTDGNFHPSPLMGGFGLKHPPPQILIKNTPVPADPPTTFNQAKLASFITQYSTGQVSVEIEWELQKENSKRWNPEIQYTSNYYKSTNVDFAVNTEGTYSEPRPIGTRYLTRNL

SEQ ID NO: 74 - protein, 771 aa, Artificial Sequence
  NLS Peptide
MAADGYLPDWLEDNLSEGIREWWDLKPGAPKPKANQQKQDNGRGLVLPGYKYLGPFNGLDKGEPVNAADAAALEHDKAYDQQLQAGDNPYLRYNHADAEFQERLQEDTSFGGNLGRAVFQAKKRVLEPLGLVESPVKTAPAAKRVKLDEDPAAKRVKLDEDAAAKRSWSAAFPGKKRPVEPSPQRSPDSSTGIGKKGQQPAKKRLNFGQTGDSESVPDPQPIGEPPAAPSGVGPNTMAAGGGAPMADNNEGADGVGSSSGNWHCDSTWLGDRVITTSTRTWALPTYNNHLYKQISNGTSGGSTNDNTYFGYSTPWGYFDFNRFHCHFSPRDWQRLINNNWGFRPKRLNFKLFNIQVKEVTQNEGTKTIANNLTSTIQVFTDSEYQLPYVLGSAHQGCLPPFPADVFMIPQYGYLTLNNGSQAVGRSSFYCLEYFPSQMLRTGNNFEFSYNFEDVPFHSSYAHSQSLDRLMNPLIDQYLYYLSRTQSTGGTAGTQQLLFSQAGPNNMSAQAKNWLPGPCYRQQRVSTTLSQNNNSNFAWTGATKYHLNGRDSLVNPGVAMATHKDDEERFFPSSGVLMFGKQGAGKDNVDYSSVMLTSEEEIKTTNPVATEQYGVVADNLQQQNAAPIVGAVNSQGALPGMVWQNRDVYLQGPIWAKIPHTDGNFHPSPLMGGFGLKHPPPQILIKNTPVPADPPTTFNQAKLASFITQYSTGQVSVEIEWELQKENSKRWNPEIQYTSNYYKSTNVDFAVNTEGTYSEPRPIGTRYLTRNL

SEQ ID NO: 75 - protein, 773 aa, Artificial Sequence
  NLS Peptide
MAADGYLPDWLEDNLSEGIREWWDLKPGAPKPKANQQKQDNGRGLVLPGYKYLGPFNGLDKGEPVNAADAAALEHDKAYDQQLQAGDNPYLRYNHADAEFQERLQEDTSFGGNLGRAVFQAKKRVLEPLGLVESPVKTAAAAKRSWSAAFEDAAAKRSWSAAFEDPAAKRVKLDPGKKRPVEPSPQRSPDSSTGIGKKGQQPAKKRLNFGQTGDSESVPDPQPIGEPPAAPSGVGPNTMAAGGGAPMADNNEGADGVGSSSGNWHCDSTWLGDRVITTSTRTWALPTYNNHLYKQISNGTSGGSTNDNTYFGYSTPWGYFDFNRFHCHFSPRDWQRLINNNWGFRPKRLNFKLFNIQVKEVTQNEGTKTIANNLTSTIQVFTDSEYQLPYVLGSAHQGCLPPFPADVFMIPQYGYLTLNNGSQAVGRSSFYCLEYFPSQMLRTGNNFEFSYNFEDVPFHSSYAHSQSLDRLMNPLIDQYLYYLSRTQSTGGTAGTQQLLFSQAGPNNMSAQAKNWLPGPCYRQQRVSTTLSQNNNSNFAWTGATKYHLNGRDSLVNPGVAMATHKDDEERFFPSSGVLMFGKQGAGKDNVDYSSVMLTSEEEIKTTNPVATEQYGVVADNLQQQNAAPIVGAVNSQGALPGMVWQNRDVYLQGPIWAKIPHTDGNFHPSPLMGGFGLKHPPPQILIKNTPVPADPPTTFNQAKLASFITQYSTGQVSVEIEWELQKENSKRWNPEIQYTSNYYKSTNVDFAVNTEGTYSEPRPIGTRYLTRNL

SEQ ID NO: 76 - protein, 789 aa, Artificial Sequence
  NLS Peptide
MAADGYLPDWLEDNLSEGIREWWDLKPGAPKPKANQQKQDNGRGLVLPGYKYLGPFNGLDKGEPVNAADAAALEHDKAYDQQLQAGDNPYLRYNHADAEFQERLQEDTSFGGNLGRAVFQAKKRVLEPLGLVESPVKTAYGDYSNQQSGYGKVSRRGGHQNSYKPYEDAAAKRSWSAAFEDPAAKRVKLDPGKKRPVEPSPQRSPDSSTGIGKKGQQPAKKRLNFGQTGDSESVPDPQPIGEPPAAPSGVGPNTMAAGGGAPMADNNEGADGVGSSSGNWHCDSTWLGDRVITTSTRTWALPTYNNHLYKQISNGTSGGSTNDNTYFGYSTPWGYFDFNRFHCHFSPRDWQRLINNNWGFRPKRLNFKLFNIQVKEVTQNEGTKTIANNLTSTIQVFTDSEYQLPYVLGSAHQGCLPPFPADVFMIPQYGYLTLNNGSQAVGRSSFYCLEYFPSQMLRTGNNFEFSYNFEDVPFHSSYAHSQSLDRLMNPLIDQYLYYLSRTQSTGGTAGTQQLLFSQAGPNNMSAQAKNWLPGPCYRQQRVSTTLSQNNNSNFAWTGATKYHLNGRDSLVNPGVAMATHKDDEERFFPSSGVLMFGKQGAGKDNVDYSSVMLTSEEEIKTTNPVATEQYGVVADNLQQQNAAPIVGAVNSQGALPGMVWQNRDVYLQGPIWAKIPHTDGNFHPSPLMGGFGLKHPPPQILIKNTPVPADPPTTFNQAKLASFITQYSTGQVSVEIEWELQKENSKRWNPEIQYTSNYYKSTNVDFAVNTEGTYSEPRPIGTRYLTRNL

SEQ ID NO: 77 - protein, 747 aa, Artificial Sequence
  NLS Peptide
MAADGYLPDWLEDNLSEGIREWWDLKPGAPKPKANQQKQDNGRGLVLPGYKYLGPFNGLDKGEPVNAADAAALEHDKAYDQQLQAGDNPYLRYNHADAEFQERLQEDTSFGGNLGRAVFQAKKRVLEPLGLVESPVKTAPAAKRVKLDPGKKRPVEPSPQRSPDSSTGIGKKGQQPAKKRLNFGQTGDSESVPDPQPIGEPPAAPSGVGPNTMAAGGGAPMADNNEGADGVGSSSGNWHCDSTWLGDRVITTSTRTWALPTYNNHLYKQISNGTSGGSTNDNTYFGYSTPWGYFDFNRFHCHFSPRDWQRLINNNWGFRPKRLNFKLFNIQVKEVTQNEGTKTIANNLTSTIQVFTDSEYQLPYVLGSAHQGCLPPFPADVFMIPQYGYLTLNNGSQAVGRSSFYCLEYFPSQMLRTGNNFEFSYNFEDVPFHSSYAHSQSLDRLMNPLIDQYLYYLSRTQSTGGTAGTQQLLFSQAGPNNMSAQAKNWLPGPCYRQQRVSTTLSQNNNSNFAWTGATKYHLNGRDSAVNPGVAMATHKDDEERFFPSSGVLMFGKQGAGKDNVDYSSVMLTSEEEIKTTNPVATEQYGVVADNLQQQNAAPIVGAVNSQGALPGMVWQNRDVYLQGPIWAKIPHTDGNFHPSPLMGGFGLKHPPPQILIKNTPVPADPPTTFNQAKLASFITQYSTGQVSVEIEWELQKENSKRWNPEIQYTSNYYKSTNVDFAVNTEGTYSEPRPIGTRYLTRNL

SEQ ID NO: 78 - protein, 747 aa, Artificial Sequence
  NLS Peptide
MAADGYLPDWLEDNLSEGIREWWDLKPGAPKPKANQQKQDNGRGLVLPGYKYLGPFNGLDKGEPVNAADAAALEHDKAYDQQLQAGDNPYLRYNHADAEFQERLQEDTSFGGNLGRAVFQAKKRVLEPLGLVESPVKTAPGKKRPVEPSPQRSPDSSTGIGKPAAKRVKLDKGQQPAKKRLNFGQTGDSESVPDPQPIGEPPAAPSGVGPNTMAAGGGAPMADNNEGADGVGSSSGNWHCDSTWLGDRVITTSTRTWALPTYNNHLYKQISNGTSGGSTNDNTYFGYSTPWGYFDFNRFHCHFSPRDWQRLINNNWGFRPKRLNFKLFNIQVKEVTQNEGTKTIANNLTSTIQVFTDSEYQLPYVLGSAHQGCLPPFPADVFMIPQYGYLTLNNGSQAVGRSSFYCLEYFPSQMLRTGNNFEFSYNFEDVPFHSSYAHSQSLDRLMNPLIDQYLYYLSRTQSTGGTAGTQQLLFSQAGPNNMSAQAKNWLPGPCYRQQRVSTTLSQNNNSNFAWTGATKYHLNGRDSLVNPGVAMATHKDDEERFFPSSGVLMFGKQGAGKDNVDYSSVMLTSEEEIKTTNPVATEQYGVVADNLQQQNAAPIVGAVNSQGALPGMVWQNRDVYLQGPIWAKIPHTDGNFHPSPLMGGFGLKHPPPQILIKNTPVPADPPTTFNQAKLASFITQYSTGQVSVEIEWELQKENSKRWNPEIQYTSNYYKSTNVDFAVNTEGTYSEPRPIGTRYLTRNL

SEQ ID NO: 79 - protein, 758 aa, Artificial Sequence
  NLS Peptide
MAADGYLPDWLEDNLSEGIREWWDLKPGAPKPKANQQKQDNGRGLVLPGYKYLGPFNGLDKGEPVNAADAAALEHDKAYDQQLQAGDNPYLRYNHADAEFQERLQEDTSFGGNLGRAVFQAKKRVLEPLGLVESPVKTAPGKKRPVEPSPQRSPDSSTGIGKPAAKRVKLDEDPAAKRVKLDKGQQPAKKRLNFGQTGDSESVPDPQPIGEPPAAPSGVGPNTMAAGGGAPMADNNEGADGVGSSSGNWHCDSTWLGDRVITTSTRTWALPTYNNHLYKQISNGTSGGSTNDNTYFGYSTPWGYFDFNRFHCHFSPRDWQRLINNNWGFRPKRLNFKLFNIQVKEVTQNEGTKTIANNLTSTIQVFTDSEYQLPYVLGSAHQGCLPPFPADVFMIPQYGYLTLNNGSQAVGRSSFYCLEYFPSQMLRTGNNFEFSYNFEDVPFHSSYAHSQSLDRLMNPLIDQYLYYLSRTQSTGGTAGTQQLLFSQAGPNNMSAQAKNWLPGPCYRQQRVSTTLSQNNNSNFAWTGATKYHLNGRDSLVNPGVAMATHKDDEERFFPSSGVLMFGKQGAGKDNVDYSSVMLTSEEEIKTTNPVATEQYGVVADNLQQQNAAPIVGAVNSQGALPGMVWQNRDVYLQGPIWAKIPHTDGNFHPSPLMGGFGLKHPPPQILIKNTPVPADPPTTFNQAKLASFITQYSTGQVSVEIEWELQKENSKRWNPEIQYTSNYYKSTNVDFAVNTEGTYSEPRPIGTRYLTRNL

SEQ ID NO: 80 - protein, 745 aa, Artificial Sequence
  NLS Peptide
MAADGYLPDWLEDNLSEGIREWWDLKPGAPKPKANQQKQDNGRGLVLPGYKYLGPFNGLDKGEPVNAADAAALEHDKAYDQQLQAGDNPYLRYNHADAEFQERLQEDTSFGGNLGRAVFQAKKRVLEPLGLVESPVKTAPGKKRPVEPSPQRSPDSSTGIGKPKKKRKVKGQQPAKKRLNFGQTGDSESVPDPQPIGEPPAAPSGVGPNTMAAGGGAPMADNNEGADGVGSSSGNWHCDSTWLGDRVITTSTRTWALPTYNNHLYKQISNGTSGGSTNDNTYFGYSTPWGYFDFNRFHCHFSPRDWQRLINNNWGFRPKRLNFKLFNIQVKEVTQNEGTKTIANNLTSTIQVFTDSEYQLPYVLGSAHQGCLPPFPADVFMIPQYGYLTLNNGSQAVGRSSFYCLEYFPSQMLRTGNNFEFSYNFEDVPFHSSYAHSQSLDRLMNPLIDQYLYYLSRTQSTGGTAGTQQLLFSQAGPNNMSAQAKNWLPGPCYRQQRVSTTLSQNNNSNFAWTGATKYHLNGRDSLVNPGVAMATHKDDEERFFPSSGVLMFGKQGAGKDNVDYSSVMLTSEEEIKTTNPVATEQYGVVADNLQQQNAAPIVGAVNSQGALPGMVWQNRDVYLQGPIWAKIPHTDGNFHPSPLMGGFGLKHPPPQILIKNTPVPADPPTTFNQAKLASFITQYSTGQVSVEIEWELQKENSKRWNPEIQYTSNYYKSTNVDFAVNTEGTYSEPRPIGTRYLTRNL

SEQ ID NO: 81 - protein, 754 aa, Artificial Sequence
  Viral Peptide
MAADGYLPDWLEDNLSEGIREWWDLKPGAPKPKANQQKQDNGRGLVLPGYKYLGPFNGLDKGEPVNAADAAALEHDKAYDQQLQAGDNPYLRYNHADAEFQERLQEDTSFGGNLGRAVFQAKKRVLEPLGLVESPVKTAPGKKRPVEPSPQRSPDSSTGIGKPKKKRKVEDPKKKRKVKGQQPAKKRLNFGQTGDSESVPDPQPIGEPPAAPSGVGPNTMAAGGGAPMADNNEGADGVGSSSGNWHCDSTWLGDRVITTSTRTWALPTYNNHLYKQISNGTSGGSTNDNTYFGYSTPWGYFDFNRFHCHFSPRDWQRLINNNWGFRPKRLNFKLFNIQVKEVTQNEGTKTIANNLTSTIQVFTDSEYQLPYVLGSAHQGCLPPFPADVFMIPQYGYLTLNNGSQAVGRSSFYCLEYFPSQMLRTGNNFEFSYNFEDVPFHSSYAHSQSLDRLMNPLIDQYLYYLSRTQSTGGTAGTQQLLFSQAGPNNMSAQAKNWLPGPCYRQQRVSTTLSQNNNSNFAWTGATKYHLNGRDSLVNPGVAMATHKDDEERFFPSSGVLMFGKQGAGKDNVDYSSVMLTSEEEIKTTNPVATEQYGVVADNLQQQNAAPIVGAVNSQGALPGMVWQNRDVYLQGPIWAKIPHTDGNFHPSPLMGGFGLKHPPPQILIKNTPVPADPPTTFNQAKLASFITQYSTGQVSVEIEWELQKENSKRWNPEIQYTSNYYKSTNVDFAVNTEGTYSEPRPIGTRYLTRNL

SEQ ID NO: 82 - protein, 749 aa, Artificial Sequence
  NLS Peptide
MAADGYLPDWLEDNLSEGIREWWDLKPGAPKPKANQQKQDNGRGLVLPGYKYLGPFNGLDKGEPVNAADAAALEHDKAYDQQLQAGDNPYLRYNHADAEFQERLQEDTSFGGNLGRAVFQAKKRVLEPLGLVESPVKTAPGKKRPVEPSPQRSPDSSTGIGKAAAKRSWSAAFKGQQPAKKRLNFGQTGDSESVPDPQPIGEPPAAPSGVGPNTMAAGGGAPMADNNEGADGVGSSSGNWHCDSTWLGDRVITTSTRTWALPTYNNHLYKQISNGTSGGSTNDNTYFGYSTPWGYFDFNRFHCHFSPRDWQRLINNNWGFRPKRLNFKLFNIQVKEVTQNEGTKTIANNLTSTIQVFTDSEYQLPYVLGSAHQGCLPPFPADVFMIPQYGYLTLNNGSQAVGRSSFYCLEYFPSQMLRTGNNFEFSYNFEDVPFHSSYAHSQSLDRLMNPLIDQYLYYLSRTQSTGGTAGTQQLLFSQAGPNNMSAQAKNWLPGPCYRQQRVSTTLSQNNNSNFAWTGATKYHLNGRDSLVNPGVAMATHKDDEERFFPSSGVLMFGKQGAGKDNVDYSSVMLTSEEEIKTTNPVATEQYGVVADNLQQQNAAPIVGAVNSQGALPGMVWQNRDVYLQGPIWAKIPHTDGNFHPSPLMGGFGLKHPPPQILIKNTPVPADPPTTFNQAKLASFITQYSTGQVSVEIEWELQKENSKRWNPEIQYTSNYYKSTNVDFAVNTEGTYSEPRPIGTRYLTRNL

SEQ ID NO: 83 - protein, 762 aa, Artificial Sequence
  NLS Peptide
MAADGYLPDWLEDNLSEGIREWWDLKPGAPKPKANQQKQDNGRGLVLPGYKYLGPFNGLDKGEPVNAADAAALEHDKAYDQQLQAGDNPYLRYNHADAEFQERLQEDTSFGGNLGRAVFQAKKRVLEPLGLVESPVKTAPGKKRPVEPSPQRSPDSSTGIGKAAAKRSWSAAFEDAAAKRSWSAAFKGQQPAKKRLNFGQTGDSESVPDPQPIGEPPAAPSGVGPNTMAAGGGAPMADNNEGADGVGSSSGNWHCDSTWLGDRVITTSTRTWALPTYNNHLYKQISNGTSGGSTNDNTYFGYSTPWGYFDFNRFHCHFSPRDWQRLINNNWGFRPKRLNFKLFNIQVKEVTQNEGTKTIANNLTSTIQVFTDSEYQLPYVLGSAHQGCLPPFPADVFMIPQYGYLTLNNGSQAVGRSSFYCLEYFPSQMLRTGNNFEFSYNFEDVPFHSSYAHSQSLDRLMNPLIDQYLYYLSRTQSTGGTAGTQQLLFSQAGPNNMSAQAKNWLPGPCYRQQRVSTTLSQNNNSNFAWTGATKYHLNGRDSLVNPGVAMATHKDDEERFFPSSGVLMFGKQGAGKDNVDYSSVMLTSEEEIKTTNPVATEQYGVVADNLQQQNAAPIVGAVNSQGALPGMVWQNRDVYLQGPIWAKIPHTDGNFHPSPLMGGFGLKHPPPQILIKNTPVPADPPTTFNQAKLASFITQYSTGQVSVEIEWELQKENSKRWNPEIQYTSNYYKSTNVDFAVNTEGTYSEPRPIGTRYLTRNL

SEQ ID NO: 84 - protein, 27 aa, Artificial Sequence
  NLS Peptide
FGNYNNQSSNFGPLRGGNFGGRSSGPY

SEQ ID NO: 85 - protein, 27 aa, Artificial Sequence
  NLS Peptide
FGNYNNQSSNFGPLKGGNFGGRSSGPY

SEQ ID NO: 86 - protein, 9 aa, Artificial Sequence
  NLS Peptide
PAAKRVKLD

SEQ ID NO: 87 - protein, 9 aa, Artificial Sequence
  NLS Peptide
PAARRVRLD

SEQ ID NO: 88 - protein, 27 aa, Artificial Sequence
  NLS Peptide
YGDYSNQQSGYGKVSRRGGHQNSYKPY

SEQ ID NO: 89 - protein, 27 aa, Artificial Sequence
  NLS Peptide
GEGERPAQNEKRKEKNIKRGGNRFEPY

SEQ ID NO: 90 - protein, 29 aa, Artificial Sequence
  NLS Peptide
RYLTQETNKVETYKEQPLKTPGKKKKGKP

SEQ ID NO: 91 - protein, 9 aa, Artificial Sequence
  NLS Peptide
RAAKRPRTT

SEQ ID NO: 92 - protein, 11 aa, Artificial Sequence
  NLS Peptide
AAAKRSWSAAF

SEQ ID NO: 93 - protein, 20 aa, Artificial Sequence
  NLS Peptide
PAAKRVKLDEDPAAKRVKLD

SEQ ID NO: 94 - protein, 31 aa, Artificial Sequence
  NLS Peptide
PAAKRVKLDEDPAAKRVKLDEDPAAKRVKLD

SEQ ID NO: 95 - protein, 7 aa, Artificial Sequence
  NLS Peptide
PKKKRKV

SEQ ID NO: 96 - protein, 16 aa, Artificial Sequence
  NLS Peptide
PKKKRKVEDPKKKRKV

SEQ ID NO: 97 - protein, 25 aa, Artificial Sequence
  NLS Peptide
PKKKRKVEDPKKKRKVEDPKKKRKV

SEQ ID NO: 98 - protein, 24 aa, Artificial Sequence
  NLS Peptide
AAAKRSWSAAFEDAAAKRSWSAAF

SEQ ID NO: 99 - protein, 37 aa, Artificial Sequence
  NLS Peptide
AAAKRSWSAAFEDAAAKASWSAAFEDAAAKRSWSAAF

SEQ ID NO: 100 - protein, 22 aa, Artificial Sequence
  NLS Peptide
AAAKRSWSAAFEDPAAKRVKLD

SEQ ID NO: 101 - protein, 22 aa, Artificial Sequence
  NLS Peptide
PAAKRVKLDEDAAAKRSWSAAF

SEQ ID NO: 102 - protein, 33 aa, Artificial Sequence
  NLS Peptide
PAAKRVKLDEDPAAKRVKLDEDAAAKRSWSAAF

SEQ ID NO: 103 - protein, 35 aa, Artificial Sequence
  NLS Peptide
AAAKRSWSAAFEDAAAKRSWSAAFEDPAAKRVKLD

SEQ ID NO: 104 - protein, 51 aa, Artificial Sequence
  NLS Peptide
YGDYSNQQSGYGKVSRRGGHQNSYKPYEDAAAKRSWSAAFEDPAAKRVKLD

SEQ ID NO: 105 - protein, 747 aa, Artificial Sequence
  NLS Peptide
MAADGYLPDWLEDNLSEGIREWWDLKPGAPKPPAAKRVKLDKANQQKQDNGRGLVLPGYKYLGPFNGLDKGEPVNAADAAALEHDKAYDQQLQAGDNPYLRYNHADAEFQERLQEDTSFGGNLGRAVFQAKKRVLEPLGLVESPVKTAPGKKRPVEPSPQRSPDSSTGIGKKGQQPAKKRLNFGQTGDSESVPDPQPIGEPPAAPSGVGPNTMAAGGGAPMADNNEGADGVGSSSGNWHCDSTWLGDRVITTSTRTWALPTYNNHLYKQISNGTSGGSTNDNTYFGYSTPWGYFDFNRFHCHFSPRDWQRLINNNWGFRPKRLNFKLFNIQVKEVTQNEGTKTIANNLTSTIQVFTDSEYQLPYVLGSAHQGCLPPFPADVFMIPQYGYLTLNNGSQAVGRSSFYCLEYFPSQMLRTGNNFEFSYNFEDVPFHSSYAHSQSLDRLMNPLIDQYLYYLSRTQSTGGTAGTQQLLFSQAGPNNMSAQAKNWLPGPCYRQQRVSTTLSQNNNSNFAWTGATKYHLNGRDSLVNPGVAMATHKDDEERFFPSSGVLMFGKQGAGKDNVDYSSVMLTSEEEIKTTNPVATEQYGVVADNLQQQNAAPIVGAVNSQGALPGMVWQNRDVYLQGPIWAKIPHTDGNFHPSPLMGGFGLKHPPPQILIKNTPVPADPPTTFNQAKLASFITQYSTGQVSVEIEWELQKENSKRWNPEIQYTSNYYKSTNVDFAVNTEGTYSEPRPIGTRYLTRNL

SEQ ID NO: 106 - protein, 747 aa, Artificial Sequence
  NLS Peptide
MAADGYLPDWLEDNLSEGIREWWDLKPGAPKPKAPAAKRVKLDNQQKQDNGRGLVLPGYKYLGPFNGLDKGEPVNAADAAALEHDKAYDQQLQAGDNPYLRYNHADAEFQERLQEDTSFGGNLGRAVFQAKKRVLEPLGLVESPVKTAPGKKRPVEPSPQRSPDSSTGIGKKGQQPAKKRLNFGQTGDSESVPDPQPIGEPPAAPSGVGPNTMAAGGGAPMADNNEGADGVGSSSGNWHCDSTWLGDRVITTSTRTWALPTYNNHLYKQISNGTSGGSTNDNTYFGYSTPWGYFDFNRFHCHFSPRDWQRLINNNWGFRPKRLNFKLFNIQVKEVTQNEGTKTIANNLTSTIQVFTDSEYQLPYVLGSAHQGCLPPFPADVFMIPQYGYLTLNNGSQAVGRSSFYCLEYFPSQMLRTGNNFEFSYNFEDVPFHSSYAHSQSLDRLMNPLIDQYLYYLSRTQSTGGTAGTQQLLFSQAGPNNMSAQAKNWLPGPCYRQQRVSTTLSQNNNSNFAWTGATKYHLNGRDSLVNPGVAMATHKDDEERFFPSSGVLMFGKQGAGKDNVDYSSVMLTSEEEIKTTNPVATEQYGVVADNLQQQNAAPIVGAVNSQGALPGMVWQNRDVYLQGPIWAKIPHTDGNFHPSPLMGGFGLKHPPPQILIKNTPVPADPPTTFNQAKLASFITQYSTGQVSVEIEWELQKENSKRWNPEIQYTSNYYKSTNVDFAVNTEGTYSEPRPIGTRYLTRNL

SEQ ID NO: 107 - protein, 758 aa, Artificial Sequence
  NLS Peptide
MAADGYLPDWLEDNLSEGIREWWDLKPGAPKPPAAKRVKLDEDPAAKRVKLDKANQQKQDNGRGLVLPGYKYLGPFNGLDKGEPVNAADAAALEHDKAYDQQLQAGDNPYLRYNHADAEFQERLQEDTSFGGNLGRAVFQAKKRVLEPLGLVESPVKTAPGKKRPVEPSPQRSPDSSTGIGKKGQQPAKKRLNFGQTGDSESVPDPQPIGEPPAAPSGVGPNTMAAGGGAPMADNNEGADGVGSSSGNWHCDSTWLGDRVITTSTRTWALPTYNNHLYKQISNGTSGGSTNDNTYFGYSTPWGYFDFNRFHCHFSPRDWQRLINNNWGFRPKRLNFKLFNIQVKEVTQNEGTKTIANNLTSTIQVFTDSEYQLPYVLGSAHQGCLPPFPADVFMIPQYGYLTLNNGSQAVGRSSFYCLEYFPSQMLRTGNNFEFSYNFEDVPFHSSYAHSQSLDRLMNPLIDQYLYYLSRTQSTGGTAGTQQLLFSQAGPNNMSAQAKNWLPGPCYRQQRVSTTLSQNNNSNFAWTGATKYHLNGRDSLVNPGVAMATHKDDEERFFPSSGVLMFGKQGAGKDNVDYSSVMLTSEEEIKTTNPVATEQYGVVADNLQQQNAAPIVGAVNSQGALPGMVWQNRDVYLQGPIWAKIPHTDGNFHPSPLMGGFGLKHPPPQILIKNTPVPADPPTTFNQAKLASFITQYSTGQVSVEIEWELQKENSKRWNPEIQYTSNYYKSTNVDFAVNTEGTYSEPRPIGTRYLTRNL

SEQ ID NO: 108 - protein, 758 aa, Artificial Sequence
  NLS Peptide
MAADGYLPDWLEDNLSEGIREWWDLKPGAPKPKAPAAKRVKLDEDPAAKRVKLDNQQKQDNGRGLVLPGYKYLGPFNGLDKGEPVNAADAAALEHDKAYDQQLQAGDNPYLRYNHADAEFQERLQEDTSFGGNLGRAVFQAKKRVLEPLGLVESPVKTAPGKKRPVEPSPQRSPDSSTGIGKKGQQPAKKRLNFGQTGDSESVPDPQPIGEPPAAPSGVGPNTMAAGGGAPMADNNEGADGVGSSSGNWHCDSTWLGDRVITTSTRTWALPTYNNHLYKQISNGTSGGSTNDNTYFGYSTPWGYFDFNRFHCHFSPRDWQRLINNNWGFRPKRLNFKLFNIQVKEVTQNEGTKTIANNLTSTIQVFTDSEYQLPYVLGSAHQGCLPPFPADVFMIPQYGYLTLNNGSQAVGRSSFYCLEYFPSQMLRTGNNFEFSYNFEDVPFHSSYAHSQSLDRLMNPLIDQYLYYLSRTQSTGGTAGTQQLLFSQAGPNNMSAQAKNWLPGPCYRQQRVSTTLSQNNNSNFAWTGATKYHLNGRDSLVNPGVAMATHKDDEERFFPSSGVLMFGKQGAGKDNVDYSSVMLTSEEEIKTTNPVATEQYGVVADNLQQQNAAPIVGAVNSQGALPGMVWQNRDVYLQGPIWAKIPHTDGNFHPSPLMGGFGLKHPPPQILIKNTPVPADPPTTFNQAKLASFITQYSTGQVSVEIEWELQKENSKRWNPEIQYTSNYYKSTNVDFAVNTEGTYSEPRPIGTRYLTRNL

SEQ ID NO: 109 - protein, 769 aa, Artificial Sequence
  NLS Peptide
MAADGYLPDWLEDNLSEGIREWWDLKPGAPKPKAPAAKRVKLDEDPAAKRVKLDEDPAAKRVKLDNQQKQDNGRGLVLPGYKYLGPFNGLDKGEPVNAADAAALEHDKAYDQQLQAGDNPYLRYNHADAEFQERLQEDTSFGGNLGRAVFQAKKRVLEPLGLVESPVKTAPGKKRPVEPSPQRSPDSSTGIGKKGQQPAKKRLNFGQTGDSESVPDPQPIGEPPAAPSGVGPNTMAAGGGAPMADNNEGADGVGSSSGNWHCDSTWLGDRVITTSTRTWALPTYNNHLYKQISNGTSGGSTNDNTYFGYSTPWGYFDFNRFHCHFSPRDWQRLINNNWGFRPKRLNFKLFNIQVKEVTQNEGTKTIANNLTSTIQVFTDSEYQLPYVLGSAHQGCLPPFPADVFMIPQYGYLTLNNGSQAVGRSSFYCLEYFPSQMLRTGNNFEFSYNFEDVPFHSSYAHSQSLDRLMNPLIDQYLYYLSRTQSTGGTAGTQQLLFSQAGPNNMSAQAKNWLPGPCYRQQRVSTTLSQNNNSNFAWTGATKYHLNGRDSLVNPGVAMATHKDDEERFFPSSGVLMFGKQGAGKDNVDYSSVMLTSEEEIKTTNPVATEQYGVVADNLQQQNAAPIVGAVNSQGALPGMVWQNRDVYLQGPIWAKIPHTDGNFHPSPLMGGFGLKHPPPQILIKNTPVPADPPTTFNQAKLASFITQYSTGQVSVEIEWELQKENSKRWNPEIQYTSNYYKSTNVDFAVNTEGTYSEPRPIGTRYLTRNL

SEQ ID NO: 110 - protein, 749 aa, Artificial Sequence
  NLS Peptide
MAADGYLPDWLEDNLSEGIREWWDLKPGAPKPKAAAAKRSWSAAFNQQKQDNGRGLVLPGYKYLGPFNGLDKGEPVNAADAAALEHDKAYDQQLQAGDNPYLRYNHADAEFQERLQEDTSFGGNLGRAVFQAKKRVLEPLGLVESPVKTAPGKKRPVEPSPQRSPDSSTGIGKKGQQPAKKRLNFGQTGDSESVPDPQPIGEPPAAPSGVGPNTMAAGGGAPMADNNEGADGVGSSSGNWHCDSTWLGDRVITTSTRTWALPTYNNHLYKQISNGTSGGSTNDNTYFGYSTPWGYFDFNRFHCHFSPRDWQRLINNNWGFRPKRLNFKLFNIQVKEVTQNEGTKTIANNLTSTIQVFTDSEYQLPYVLGSAHQGCLPPFPADVFMIPQYGYLTLNNGSQAVGRSSFYCLEYFPSQMLRTGNNFEFSYNFEDVPFHSSYAHSQSLDRLMNPLIDQYLYYLSRTQSTGGTAGTQQLLFSQAGPNNMSAQAKNWLPGPCYRQQRVSTTLSQNNNSNFAWTGATKYHLNGRDSLVNPGVAMATHKDDEERFFPSSGVLMFGKQGAGKDNVDYSSVMLTSEEEIKTTNPVATEQYGVVADNLQQQNAAPIVGAVNSQGALPGMVWQNRDVYLQGPIWAKIPHTDGNFHPSPLMGGFGLKHPPPQILIKNTPVPADPPTTFNQAKLASFITQYSTGQVSVEIEWELQKENSKRWNPEIQYTSNYYKSTNVDFAVNTEGTYSEPRPIGTRYLTRNL

SEQ ID NO: 111 - protein, 762 aa, Artificial Sequence
  NLS Peptide
MAADGYLPDWLEDNLSEGIREWWDLKPGAPKPKAAAAKRSWSAAFEDAAAKRSWSAAFNQQKQDNGRGLVLPGYKYLGPFNGLDKGEPVNAADAAALEHDKAYDQQLQAGDNPYLRYNHADAEFQERLQEDTSFGGNLGRAVFQAKKRVLEPLGLVESPVKTAPGKKRPVEPSPQRSPDSSTGIGKKGQQPAKKRLNFGQTGDSESVPDPQPIGEPPAAPSGVGPNTMAAGGGAPMADNNEGADGVGSSSGNWHCDSTWLGDRVITTSTRTWALPTYNNHLYKQISNGTSGGSTNDNTYFGYSTPWGYFDFNRFHCHFSPRDWQRLINNNWGFRPKRLNFKLFNIQVKEVTQNEGTKTIANNLTSTIQVFTDSEYQLPYVLGSAHQGCLPPFPADVFMIPQYGYLTLNNGSQAVGRSSFYCLEYFPSQMLRTGNNFEFSYNFEDVPFHSSYAHSQSLDRLMNPLIDQYLYYLSRTQSTGGTAGTQQLLFSQAGPNNMSAQAKNWLPGPCYRQQRVSTTLSQNNNSNFAWTGATKYHLNGRDSLVNPGVAMATHKDDEERFFPSSGVLMFGKQGAGKDNVDYSSVMLTSEEEIKTTNPVATEQYGVVADNLQQQNAAPIVGAVNSQGALPGMVWQNRDVYLQGPIWAKIPHTDGNFHPSPLMGGFGLKHPPPQILIKNTPVPADPPTTFNQAKLASFITQYSTGQVSVEIEWELQKENSKRWNPEIQYTSNYYKSTNVDFAVNTEGTYSEPRPIGTRYLTRNL

SEQ ID NO: 112 - protein, 775 aa, Artificial Sequence
  NLS Peptide
MAADGYLPDWLEDNLSEGIREWWDLKPGAPKPKAAAAKRSWSAAFEDAAAKASWSAAFEDAAAKRSWSAAFNQQKQDNGRGLVLPGYKYLGPFNGLDKGEPVNAADAAALEHDKAYDQQLQAGDNPYLRYNHADAEFQERLQEDTSFGGNLGRAVFQAKKRVLEPLGLVESPVKTAPGKKRPVEPSPQRSPDSSTGIGKKGQQPAKKRLNFGQTGDSESVPDPQPIGEPPAAPSGVGPNTMAAGGGAPMADNNEGADGVGSSSGNWHCDSTWLGDRVITTSTRTWALPTYNNHLYKQISNGTSGGSTNDNTYFGYSTPWGYFDFNRFHCHFSPRDWQRLINNNWGFRPKRLNFKLFNIQVKEVTQNEGTKTIANNLTSTIQVFTDSEYQLPYVLGSAHQGCLPPFPADVFMIPQYGYLTLNNGSQAVGRSSFYCLEYFPSQMLRTGNNFEFSYNFEDVPFHSSYAHSQSLDRLMNPLIDQYLYYLSRTQSTGGTAGTQQLLFSQAGPNNMSAQAKNWLPGPCYRQQRVSTTLSQNNNSNFAWTGATKYHLNGRDSLVNPGVAMATHKDDEERFFPSSGVLMFGKQGAGKDNVDYSSVMLTSEEEIKTTNPVATEQYGVVADNLQQQNAAPIVGAVNSQGALPGMVWQNRDVYLQGPIWAKIPHTDGNFHPSPLMGGFGLKHPPPQILIKNTPVPADPPTTFNQAKLASFITQYSTGQVSVEIEWELQKENSKRWNPEIQYTSNYYKSTNVDFAVNTEGTYSEPRPIGTRYLTRNL

SEQ ID NO: 113 - protein, 765 aa, Artificial Sequence
  NLS Peptide
MAADGYLPDWLEDNLSEGIREWWDLKPGAPKPKAYGDYSNQQSGYGKVSRRGGHQNSYKPYNQQKQDNGRGLVLPGYKYLGPFNGLDKGEPVNAADAAALEHDKAYDQQLQAGDNPYLRYNHADAEFQERLQEDTSFGGNLGRAVFQAKKRVLEPLGLVESPVKTAPGKKRPVEPSPQRSPDSSTGIGKKGQQPAKKRLNFGQTGDSESVPDPQPIGEPPAAPSGVGPNTMAAGGGAPMADNNEGADGVGSSSGNWHCDSTWLGDRVITTSTRTWALPTYNNHLYKQISNGTSGGSTNDNTYFGYSTPWGYFDFNRFHCHFSPRDWQRLINNNWGFRPKRLNFKLFNIQVKEVTQNEGTKTIANNLTSTIQVFTDSEYQLPYVLGSAHQGCLPPFPADVFMIPQYGYLTLNNGSQAVGRSSFYCLEYFPSQMLRTGNNFEFSYNFEDVPFHSSYAHSQSLDRLMNPLIDQYLYYLSRTQSTGGTAGTQQLLFSQAGPNNMSAQAKNWLPGPCYRQQRVSTTLSQNNNSNFAWTGATKYHLNGRDSLVNPGVAMATHKDDEERFFPSSGVLMFGKQGAGKDNVDYSSVMLTSEEEIKTTNPVATEQYGVVADNLQQQNAAPIVGAVNSQGALPGMVWQNRDVYLQGPIWAKIPHTDGNFHPSPLMGGFGLKHPPPQILIKNTPVPADPPTTFNQAKLASFITQYSTGQVSVEIEWELQKENSKRWNPEIQYTSNYYKSTNVDFAVNTEGTYSEPRPIGTRYLTRNL

SEQ ID NO: 114 - protein, 745 aa, Artificial Sequence
  NLS Peptide
MAADGYLPDWLEDNLSEGIREWWDLKPGAPKPKAPKKKRKVNQQKQDNGRGLVLPGYKYLGPFNGLDKGEPVNAADAAALEHDKAYDQQLQAGDNPYLRYNHADAEFQERLQEDTSFGGNLGRAVFQAKKRVLEPLGLVESPVKTAPGKKRPVEPSPQRSPDSSTGIGKKGQQPAKKRLNFGQTGDSESVPDPQPIGEPPAAPSGVGPNTMAAGGGAPMADNNEGADGVGSSSGNWHCDSTWLGDRVITTSTRTWALPTYNNHLYKQISNGTSGGSTNDNTYFGYSTPWGYFDFNRFHCHFSPRDWQRLINNNWGFRPKRLNFKLFNIQVKEVTQNEGTKTIANNLTSTIQVFTDSEYQLPYVLGSAHQGCLPPFPADVFMIPQYGYLTLNNGSQAVGRSSFYCLEYFPSQMLRTGNNFEFSYNFEDVPFHSSYAHSQSLDRLMNPLIDQYLYYLSRTQSTGGTAGTQQLLFSQAGPNNMSAQAKNWLPGPCYRQQRVSTTLSQNNNSNFAWTGATKYHLNGRDSLVNPGVAMATHKDDEERFFPSSGVLMFGKQGAGKDNVDYSSVMLTSEEEIKTTNPVATEQYGVVADNLQQQNAAPIVGAVNSQGALPGMVWQNRDVYLQGPIWAKIPHTDGNFHPSPLMGGFGLKHPPPQILIKNTPVPADPPTTFNQAKLASFITQYSTGQVSVEIEWELQKENSKRWNPEIQYTSNYYKSTNVDFAVNTEGTYSEPRPIGTRYLTRNL

SEQ ID NO: 115 - protein, 738 aa, Artificial Sequence
  Viral Peptide
MAADGYLPDWLEDNLSEGIREWWDLKPGAPKPKANQQKQDNGRGLVLPGYKYLGPFNGLDKGEPVNAADAAALEHDKAYDQQLQAGDNPYLRYNHADAEFQERLQEDTSFGGNLGRAVFQAKKRVLEPLGLVESPVKTAPGKKRPVEPSPQRSPDSSTGIGKKGQQPAKKRLNFGQTGDSESVPDPQPIGEPPAAPSGVGPNTMAAGGGAPMADNNEGADGVGSSSGNWHCDSTWLGDRVITTSTRTWALPTYNNHLYKQISNGTSGGSTNDNTYFGYSTPWGYFDFNRFHCHFSPRDWQRLINNNWGFRPKRLNFKLFNIQVKEVTQNEGTRTIANNLTSTIQVFTDSEYQLPYVLGSAHQGCLPPFPADVFMIPQYGYLTLNNGSQAVGRSSFYCLEYFPSQMLRTGNNFEFSYNFEDVPFHSSYAHSQSLDRLMNPLIDQYLYYLSRTQSTGGTAGTQQLLFSQAGPNNMSAQAKNWLPGPCYRQQRVSTTLSQNNNSNFAWTGATKYHLNGRDSLVNPGVAMATHKDDEERFFPSSGVLMFGKQGAGKDNVDYSSVMLTSEEEIKTTNPVATEQYGVVADNLQQQNAAPIVGAVNSQGALPGMVWQNRDVYLQGPIWAKIPHTDGNFHPSPLMGGFGLKHPPPQILIKNTPVPADPPTTFNQAKLASFITQYSTGQVSVEIEWELQKENSKRWNPEIQYTSNYYKSTNVDFAVNTEGTYSEPRPIGTRYLTRNL

SEQ ID NO: 116 - protein, 738 aa, Artificial Sequence
  Viral Peptide
MAADGYLPDWLEDNLSEGIREWWDLKPGAPKPKANQQKQDNGRGLVLPGYKYLGPFNGLDKGEPVNAADAAALEHDKAYDQQLQAGDNPYLRYNHADAEFQERLQEDTSFGGNLGRAVFQAKKRVLEPLGLVESPVKTAPGKKRPVEPSPQRSPDSSTGIGKKGQQPAKKRLNFGQTGDSESVPDPQPIGEPPAAPSGVGPNTMAAGGGAPMADNNEGADGVGSSSGNWHCDSTWLGDRVITTSTRTWALPTYNNHLYKQISNGTSGGSTNDNTYFGYSTPWGYFDFNRFHCHFSPRDWQRLINNNWGFRPKRLNFKLFNIQVKEVTQNEGTKTIANNLTSTIQVFTDSEYQLPYVLGSAHQGCLPPFPADVFMIPQYGYLTLNNGSQAVGRSSFYCLEYFPSQMLRTGNNFEFSYNFEDVPFHSSYAHSQSLDRLMNPLIDQYLYYLSRTQSTGGTAGTQQLLFSQAGPNNMSAQAKNWLPGPCYRQQRVSTTLSQNNNSNFAWTGATKYHLNGRDSLVNPGVAMATHRDDEERFFPSSGVLMFGKQGAGKDNVDYSSVMLTSEEEIKTTNPVATEQYGVVADNLQQQNAAPIVGAVNSQGALPGMVWQNRDVYLQGPIWAKIPHTDGNFHPSPLMGGFGLKHPPPQILIKNTPVPADPPTTFNQAKLASFITQYSTGQVSVEIEWELQKENSKRWNPEIQYTSNYYKSTNVDFAVNTEGTYSEPRPIGTRYLTRNL

SEQ ID NO: 117 - protein, 747 aa, Artificial Sequence
  NLS Peptide
MAADGYLPDWLEDNLSEGIREWWDLKPGAPKPKANQQKQDNGRGLVLPGYKYLGPFNGLDKGEPVNAADAAALEHDKAYDQQLQAGDNPYLRYNHADAEFQERLQEDTSFGGNLGRAVFQAKKRVLEPLGLVESPVKTAPGKKRPVEPSPQRSPDSSTGIGKKGQQPAKKRLNFGQTGDSESVPDPQPIGEPPAAPSGVGPNTMAAGGGAPMADNNEGADGVGSSSGNWHCDSTWLGDRVITTSTRTWALPTYNNHLYKQISNGTSGGSTNDNTYFGYSTPWGYFDFNRFHCHFSPRDWQRLINNNWGFRPKRLNFKLFNIQVKEVTQNEGTKTIANNLTSTIQVFTDSEYQLPYVLGSAHQGCLPPFPADVFMIPQYGYLTLNPAAKRVKLDNGSQAVGRSSFYCLEYFPSQMLRTGNNFEFSYNFEDVPFHSSYAHSQSLDRLMNPLIDQYLYYLSRTQSTGGTAGTQQLLFSQAGPNNMSAQAKNWLPGPCYRQQRVSTTLSQNNNSNFAWTGATKYHLNGRDSLVNPGVAMATHKDDEERFFPSSGVLMFGKQGAGKDNVDYSSVMLTSEEEIKTTNPVATEQYGVVADNLQQQNAAPIVGAVNSQGALPGMVWQNRDVYLQGPIWAKIPHTDGNFHPSPLMGGFGLKHPPPQILIKNTPVPADPPTTFNQAKLASFITQYSTGQVSVEIEWELQKENSKRWNPEIQYTSNYYKSTNVDFAVNTEGTYSEPRPIGTRYLTRNL

SEQ ID NO: 118 - protein, 747 aa, Artificial Sequence
  NLS Peptide
MAADGYLPDWLEDNLSEGIREWWDLKPGAPKPKANQQKQDNGRGLVLPGYKYLGPFNGLDKGEPVNAADAAALEHDKAYDQQLQAGDNPYLRYNHADAEFQERLQEDTSFGGNLGRAVFQAKKRVLEPLGLVESPVKTAPGKKRPVEPSPQRSPDSSTGIGKKGQQPAKKRLNFGQTGDSESVPDPQPIGEPPAAPSGVGPNTMAAGGGAPMADNNEGADGVGSSSGNWHCDSTWLGDRVITTSTRTWALPTYNNHLYKQISNGTSGGSTNDNTYFGYSTPWGYFDFNRFHCHFSPRDWQRLINNNWGFRPKRLNFKLFNIQVKEVTQNEGTKTIANNLTSTIQVFTDSEYQLPYVLGSAHQGCLPPFPADVFMIPQYGYLTLNNGSQAVGRSSFYCLEYFPSQMLRTGNNFEFSYNFEDVPFHSSYAHSQSLDRLMNPLIDQYLYYLSRPAAKRVKLDTQSTGGTAGTQQLLFSQAGPNNMSAQAKNWLPGPCYRQQRVSTTLSQNNNSNFAWTGATKYHLNGRDSLVNPGVAMATHKDDEERFFPSSGVLMFGKQGAGKDNVDYSSVMLTSEEEIKTTNPVATEQYGVVADNLQQQNAAPIVGAVNSQGALPGMVWQNRDVYLQGPIWAKIPHTDGNFHPSPLMGGFGLKHPPPQILIKNTPVPADPPTTFNQAKLASFITQYSTGQVSVEIEWELQKENSKRWNPEIQYTSNYYKSTNVDFAVNTEGTYSEPRPIGTRYLTRNL

SEQ ID NO: 119 - protein, 747 aa, Artificial Sequence
  NLS Peptide
MAADGYLPDWLEDNLSEGIREWWDLKPGAPKPKANQQKQDNGRGLVLPGYKYLGPFNGLDKGEPVNAADAAALEHDKAYDQQLQAGDNPYLRYNHADAEFQERLQEDTSFGGNLGRAVFQAKKRVLEPLGLVESPVKTAPGKKRPVEPSPQRSPDSSTGIGKKGQQPAKKRLNFGQTGDSESVPDPQPIGEPPAAPSGVGPNTMAAGGGAPMADNNEGADGVGSSSGNWHCDSTWLGDRVITTSTRTWALPTYNNHLYKQISNGTSGGSTNDNTYFGYSTPWGYFDFNRFHCHFSPRDWQRLINNNWGFRPKRLNFKLFNIQVKEVTQNEGTKTIANNLTSTIQVFTDSEYQLPYVLGSAHQGCLPPFPADVFMIPQYGYLTLNNGSQAVGRSSFYCLEYFPSQMLRTGNNFEFSYNFEDVPFHSSYAHSQSLDRLMNPLIDQYLYYLSRTQSTGGPAAKRVKLDTAGTQQLLFSQAGPNNMSAQAKNWLPGPCYRQQRVSTTLSQNNNSNFAWTGATKYHLNGRDSLVNPGVAMATHKDDEERFFPSSGVLMFGKQGAGKDNVDYSSVMLTSEEEIKTTNPVATEQYGVVADNLQQQNAAPIVGAVNSQGALPGMVWQNRDVYLQGPIWAKIPHTDGNFHPSPLMGGFGLKHPPPQILIKNTPVPADPPTTFNQAKLASFITQYSTGQVSVEIEWELQKENSKRWNPEIQYTSNYYKSTNVDFAVNTEGTYSEPRPIGTRYLTRNL

SEQ ID NO: 120 - protein, 747 aa, Artificial Sequence
  NLS Peptide
MAADGYLPDWLEDNLSEGIREWWDLKPGAPKPKANQQKQDNGRGLVLPGYKYLGPFNGLDKGEPVNAADAAALEHDKAYDQQLQAGDNPYLRYNHADAEFQERLQEDTSFGGNLGRAVFQAKKRVLEPLGLVESPVKTAPGKKRPVEPSPQRSPDSSTGIGKKGQQPAKKRLNFGQTGDSESVPDPQPIGEPPAAPSGVGPNTMAAGGGAPMADNNEGADGVGSSSGNWHCDSTWLGDRVITTSTRTWALPTYNNHLYKQISNGTSGGSTNDNTYFGYSTPWGYFDFNRFHCHFSPRDWQRLINNNWGFRPKRLNFKLFNIQVKEVTQNEGTKTIANNLTSTIQVFTDSEYQLPYVLGSAHQGCLPPFPADVFMIPQYGYLTLNNGSQAVGRSSFYCLEYFPSQMLRTGNNFEFSYNFEDVPFHSSYAHSQSLDRLMNPLIDQYLYYLSRTQSTGGTAGTQQLLFSQAGPNNMSAQAKNWLPGPCYRQQRVSTTLSQNNNSNFAWTGATKYHLNGRDSLVNPGVAMATHKDDEERFFPSSGVLMFGKQGAGKDNVDYSSVMLTSEEEIKTTNPVATEQYGVVADNLQQPAAKRVKLDQNAAPIVGAVNSQGALPGMVWQNRDVYLQGPIWAKIPHTDGNFHPSPLMGGFGLKHPPPQILIKNTPVPADPPTTFNQAKLASFITQYSTGQVSVEIEWELQKENSKRWNPEIQYTSNYYKSTNVDFAVNTEGTYSEPRPIGTRYLTRNL

SEQ ID NO: 121 - protein, 747 aa, Artificial Sequence
  NLS Peptide
MAADGYLPDWLEDNLSEGIREWWDLKPGAPKPKANQQKQDNGRGLVLPGYKYLGPFNGLDKGEPVNAADAAALEHDKAYDQQLQAGDNPYLRYNHADAEFQERLQEDTSFGGNLGRAVFQAKKRVLEPLGLVESPVKTAPGKKRPVEPSPQRSPDSSTGIGKKGQQPAKKRLNFGQTGDSESVPDPQPIGEPPAAPSGVGPNTMAAGGGAPMADNNEGADGVGSSSGNWHCDSTWLGDRVITTSTRTWALPTYNNHLYKQISNGTSGGSTNDNTYFGYSTPWGYFDFNRFHCHFSPRDWQRLINNNWGFRPKRLNFKLFNIQVKEVTQNEGTKTIANNLTSTIQVFTDSEYQLPYVLGSAHQGCLPPFPADVFMIPQYGYLTLNNGSQAVGRSSFYCLEYFPSQMLRTGNNFEFSYNFEDVPFHSSYAHSQSLDRLMNPLIDQYLYYLSRTQSTGGTAGTQQLLFSQAGPNNMSAQAKNWLPGPCYRQQRVSTTLSQNNNSNFAWTGATKYHLNGRDSLVNPGVAMATHKDDEERFFPSSGVLMFGKQGAGKDNVDYSSVMLTSEEEIKTTNPVATEQYGVVADNLQQQNPAAKRVKLDAAPIVGAVNSQGALPGMVWQNRDVYLQGPIWAKIPHTDGNFHPSPLMGGFGLKHPPPQILIKNTPVPADPPTTFNQAKLASFITQYSTGQVSVEIEWELQKENSKRWNPEIQYTSNYYKSTNVDFAVNTEGTYSEPRPIGTRYLTRNL

SEQ ID NO: 122 - protein, 735 aa, Artificial Sequence [sequence omitted]

SEQ ID NO: 123 - protein, 1457 aa, Artificial Sequence
  Viral Peptide
MQIELSTCFFLCLLRFCFSATRRYYLGAVELSWDYMQSDLGELPVDARFPPRVPKSFPFNTSVVYKKTLFVEFTDHLFNIAKPRPPWMGLLGPTIQAEVYDTVVITLKNMASHPVSLHAVGVSYWKASEGAEYDDQTSQREKEDDKVFPGGSHTYVWQVLKENGPMASDPLCLTYSYLSHVDLVKDLNSGLIGALLVCREGSLAKEKTQTLHKFILLFAVFDEGKSWHSETKNSLMQDRDAASARAWPKMHTVNGYVNRSLPGLIGCHRKSVYWHVIGMGTTPEVHSIFLEGHTFLVRNHRQASLEISPITFLTAQTLLMDLGQFLLFCHISSHQHDGMEAYVKVDSCPEEPQLRMKNNEEAEDYDDDLTDSEMDVVRFDDDNSPSFIQIRSVAKKHPKTWVHYIAAEEEDWDYAPLVLAPDDRSYKSQYLNNGPQRIGRKYKKVRFMAYTDETFKTREAIQHESGILGPLLYGEVGDTLLIIFKNQASRPYNIYPHGITDVRPLYSRRLPKGVKHLKDFPILPGEIFKYKWTVTVEDGPTKSDPRCLTRYYSSFVNMERDLASGLIGPLLICYKESVDQRGNQIMSDKRNVILFSVFDENRSWYLTENIQRFLPNPAGVQLEDPEFQASNIMHSINGYVFDSLQLSVCLHEVAYWYILSIGAQTDFLSVFFSGYTFKHKMVYEDTLTLFPFSGETVFMSMENPGLWILGCHNSDFRNRGMTALLKVSSCDKNTGDYYEDSYEDISAYLLSKNNAIEPRSFSQNPPVLKRHQREITRTTLQSDQEEIDYDDTISVEMKKEDFDIYDEDENQSPRSFQKKTRHYFIAAVERLWDYGMSSSPHVLRNRAQSGSVPQFKKVVFQEFTDGSFTQPLYRGELNEHLGLLGPYIRAEVEDNIMVTFRNQASRPYSFYSSLISYEEDQRQGAEPRKNFVKPNETKTYFWKVQHHMAPTKDEFDCKAWAYFSDVDLEKDVHSGLIGPLLVCHTNTLNPAHGRQVTVQEFALFFTIFDETKSWYFTENMERNCRAPCNIQMEDPTFKENYRFHAINGYIMDTLPGLVMAQDQRIRWYLLSMGSNENIHSIHFSGHVFTVRKKEEYKMALYNLYPGVFETVEMLPSKAGIWRVECLIGEHLHAGMSTLFLVYSNKCQTPLGMASGHIRDFQITASGQYGQWAPKLARLHYSGSINAWSTKEPFSWIKVDLLAPMIIHGIKTQGARQKFSSLYISQFIIMYSLDGKKWQTYRGNSTGTLMVFFGNVDSSGIKHNIFNPPIIARYIRLHPTHYSIRSTLRMELMGCDLNSCSMPLGMESKAISDAQITASSYFTNMFATWSPSKARLHLQGRSNAWRPQVNNPKEWLQVDFQKTMKVTGVTTQGVKSLLTSMYVKEFLISSSQDGHQWTLFFQNGKVKVFQGNQDSFTPVVNSLDPPLLTRYLRIHPQSWVHQIALRMEVLGCEAQDLY

SEQ ID NO: 124 - protein, 14 aa, Artificial Sequence
  Viral Peptide
SFSQNPPVLKRHQR

SEQ ID NO: 125 - DNA, 222 bp, Artificial Sequence
  TTR promoter
gtctgtctgcacatttcgtagagcgagtgttccgatactctaatctccctaggcaaggttcatatttgtgtaggttacttattctccttttgttgactaagtcaataatcagaatcagcaggtttggagtcagcttggcagggatcagcagcctgggttggaaggagggggtataaaagccccttcaccaggagaagccgtcacacagatccacaagctcct

SEQ ID NO: 126 - DNA, 200 bp, Artificial Sequence
  TTRmut promoter
gtctgtctgcacatttcgtagagcgagtgttccgatactctaatctccctaggcaaggttcatattgacttaggttacttattctccttttgttgactaagtcaataatcagaatcagcaggtttggagtcagcttggcagggatcagcagcctgggttggaaggagggggtataaaagccccttcaccaggagaagccg

SEQ ID NO: 127 - DNA, 19 bp, Artificial Sequence
  ApoE forward primer
ttgtcctggcgtggtttag

SEQ ID NO: 128 - DNA, 20 bp, Artificial Sequence
  ApoE reverse primer
tgcagaatccttagtggctg

SEQ ID NO: 129 - DNA, 22 bp, Artificial Sequence
  Probe
tccactggtagcaagatccccg

SEQ ID NO: 130 - DNA, 20 bp, Artificial Sequence
  Renluc forward primer
aggccgcgttaccatgtaaa

SEQ ID NO: 131 - DNA, 20 bp, Artificial Sequence
  Renluc reverse primer
tgataactggtccgcagtgg

SEQ ID NO: 132 - DNA, 22 bp, Artificial Sequence
  Probe
tgggccagatgtaaacaaatga

SEQ ID NO: 133 - protein, 13 aa, Artificial Sequence
  Viral Peptide
GLFDIIKKIAESF

SEQ ID NO: 134 - protein, 7 aa, Artificial Sequence
  Viral Peptide
FFLIPKG

SEQ ID NO: 135 - protein, 27 aa, Artificial Sequence
  Viral Peptide
GWTLNSAGYLLGKINLKALAALAKKIL

SEQ ID NO: 136 - protein, 13 aa, Artificial Sequence
  Viral Peptide
GRKKRRQRRRPPQ

SEQ ID NO: 137 - protein, 15 aa, Artificial Sequence
  Viral Peptide
KKAAAVLLPVLLAAP

SEQ ID NO: 138 - protein, 18 aa, Artificial Sequence
  Viral Peptide
RQIKIWFQNRRLKWKKGG

SEQ ID NO: 139 - protein, 16 aa, Artificial Sequence
  Viral Peptide
RRRRRRRRRRRRRRRR

SEQ ID NO: 140 - protein, 16 aa, Artificial Sequence
  Viral Peptide
KKKKKKKKKKKKKKKK

SEQ ID NO: 141 - protein, 36 aa, Artificial Sequence
  Viral Peptide
RRRRRRRRRRRRRRRRLRVRLASHLRKLRKRLLRDA

What is claimed:

1. An adeno-associated virus (AAV) capsid protein, wherein said capsid protein is modified from a parental AAV capsid protein to have a peptide insertion comprising a nuclear localization signal (NLS) sequence.

2. An adeno-associated virus (AAV) capsid protein, wherein said capsid protein is modified from a parental capsid protein to have an amino acid substitution at an RXXL site or a (L/P)PXY site, where X can be any amino acid.

3. An adeno-associated virus (AAV) capsid protein, wherein said capsid protein is modified from a parental AAV capsid protein, and wherein said capsid protein is at least 90% identical to SEQ ID NO:1 and has an alanine at amino acid position 517 of SEQ ID NO:1, or is at least 90% identical to SEQ ID NO:59 and has an alanine at position 519 of SEQ ID NO:59, or is at least 90% identical to a capsid protein of another AAV serotype and has an alanine at the corresponding amino acid position in the capsid protein of the other AAV serotype.

4. An adeno-associated virus (AAV) capsid protein, wherein said capsid protein is modified from a parental AAV capsid protein, and wherein said capsid protein is at least 90% identical to SEQ ID NO:1 and has an arginine at any of amino acid positions 137, 528, 533 and 545 of SEQ ID NO:1, or is at least 90% identical to SEQ ID NO:59 and has an arginine at any of amino acid positions 137, 333 and 530 of SEQ ID NO:59, or is at least 90% identical to a capsid protein of another AAV serotype and has an arginine at any of the corresponding amino acid positions in the capsid protein of the other AAV serotype.

5. The modified AAV capsid protein of any of claims 2-4, wherein said capsid protein further comprises an insertion of a nuclear localization sequence.

6. The modified AAV capsid protein of claim 1 or 5, wherein said nuclear localization sequence does not comprise an AAV nuclear localization sequence.

7. The modified AAV capsid protein of claim 1 or 5, wherein said nuclear localization sequence comprises an additional AAV nuclear localization sequence from the same or different AAV serotype.

8. The modified AAV capsid protein of any of claims 2-4, wherein said capsid protein further comprises an insertion of a cell penetrating peptide.

9. The modified AAV capsid protein of claim 1 or 5-8, wherein said peptide insertion, nuclear localization sequence or cell penetrating peptide has a length of about 5 amino acids to about 60 amino acids.

10. The modified AAV capsid protein of claim 1 or 5-8, wherein said peptide insertion is located at a position within amino acids 1-52 of AAV VP1 capsid protein.

11. The modified AAV capsid protein of claim 1 or 5-8, wherein said peptide insertion is located at a position between basic region 1 (BR1) and basic region 2 (BR2) of said AAV capsid protein.

12. The modified AAV capsid protein of claim 1 or 5-8, wherein said peptide insertion is located at a position between basic region 2 (BR2) and basic region 3 (BR3) of said AAV capsid protein.

13. The modified AAV capsid protein of claim 1 or 5-8, wherein said peptide insertion is in AAV VP1 and/or VP2 and/or VP3 capsid proteins.

14. The modified AAV capsid protein of claim 1 or 5-8, wherein said peptide insertion is not in AAV VP2 and/or VP3 capsid protein.

15. The modified AAV capsid protein of claim 1 or 5-8, wherein said peptide insertion is not in basic region 1 (BR1), basic region 2 (BR2), basic region 3 (BR3), basic region 4 (BR4) or basic region 5 (BR5).

16. The modified AAV capsid protein of claim 1 or 5-8, wherein said peptide insertion is not in a phospholipase A2 (PLA2) domain.

17. The modified AAV capsid protein of claim 1 or 5-8, wherein said peptide insertion is located in loop 3 (aka subloop I in loop IV) of VP1 capsid protein.

18. The modified AAV capsid protein of claim 1 or 5-8, wherein said peptide insertion is located immediately after any amino acid in the range of positions 30-40, 135-141, 147-166, 380-390, 445-460 or 585-595 of VP1 capsid protein.

19. The modified AAV capsid protein of claim 1 or 5-8, wherein said peptide insertion is located immediately after any amino acid in the range of positions 32-33, 34-35, 36-37, 138-139, 139-140, 162-163, 384-385, 450-451, 456-457, 588-589 or 590-591 of VP1 capsid protein.

20. The modified AAV capsid protein of any of claims 1-19, wherein said modified AAV capsid protein has 90% or more identity to a sequence selected from SEQ ID NOs:2-46 and 56-58.

21. The modified AAV capsid protein of any of claims 1-19, wherein said modified AAV capsid protein has 90% or more identity to a sequence selected from SEQ ID NOs:47-55.

22. The modified AAV capsid protein of any of claims 1-19, wherein said modified AAV capsid protein has 90% or more identity to a sequence selected from SEQ ID NOs:60-83.

23. The modified AAV capsid protein of any of claims 1-19, wherein said modified AAV capsid protein has 90% or more identity to a sequence selected from SEQ ID NOs:105-121.

24. The modified AAV capsid protein of any of claims 1 and 5-23, wherein said peptide insertion is 90% or more identical to a sequence selected from SEQ ID NOs:84-104.

25. The modified AAV capsid protein of any of claims 1 and 5-23, wherein said peptide insertion comprises at least two sequences selected from any of SEQ ID NOs:84-92 and 95.

26. The modified AAV capsid protein of claim 25, wherein said at least two sequences selected from any of SEQ ID NOs:84-92 and 95 are the same sequence.

27. The modified AAV capsid protein of claim 26, wherein said at least two sequences selected from any of SEQ ID NOs:84-92 and 95 are different sequences.

28. The modified AAV capsid protein of any of claims 23-27, wherein the at least two sequences are separated by 1-5 intervening amino acid residues.

29. The modified AAV capsid protein of any of claims 1, 5-20 and 22, wherein said peptide insertion comprises a tandem repeat of a sequence selected from any of SEQ ID NOs:84-92 and 95.

30. The modified AAV capsid protein of any of claims 1, 5-20 and 22, wherein said peptide insertion comprises a tandem repeat of at least 2 sequences selected from any of SEQ ID NOs:84-92 and 95 wherein any of the 1^{st} of said at least 2 sequences is positioned at the 5′ end of the 2^{nd} sequence and any of the 2^{nd} of said at least 2 sequences is positioned at the 3′ end of the 1s^{t} sequence.

31. The modified AAV capsid protein of any of claims 1, 5-20 and 22, wherein said peptide insertion comprises a tandem repeat of at least 3 sequences selected from any of SEQ ID NOs:93, 94 and 96-104.

32. The modified AAV capsid protein of any of claims 1, 5-20 and 22, wherein the peptide insertion comprises a tandem repeat of at least 3 sequences selected from any of SEQ ID NOs:84-92 and 95, wherein the 1^{st} of said at least 3 sequences is positioned at the 5′ end of the 2^{nd} sequence, the 2^{nd} of said at least 3 sequences is positioned at the 3′ end of the 1^{st} sequence and the 3^{rd} of said at least 3 sequences is positioned at the 3′ end of the 2^{nd} sequence.

33. The modified AAV capsid protein of any of claims 27-32, wherein the tandem repeats are separated by 1-5 intervening amino acid residues.

34. The modified AAV capsid protein of any of claims 1, 5-20 and 22, wherein said peptide insertion comprises any of SEQ ID NOs:84-104 with one or more amino acid substitutions.

35. The modified AAV capsid protein of any of claims 1, 5-20 and 22, wherein said peptide insertion comprises any of SEQ ID NOs:84-104 with 1-10 amino acid substitutions.

36. The modified AAV capsid protein of any of claims 1, 5-20 and 22, wherein said peptide insertion comprises any of SEQ ID NOs:84-104 with one or more conservative amino acid substitutions.

37. The modified AAV capsid protein of any of claims 1, 5-20 and 22, wherein the AAV capsid protein having the peptide insertion comprises SEQ ID NO:1, SEQ ID NO:59 or SEQ ID NO:122.

38. The modified AAV capsid protein of any of claims 1, 5-20 and 22, wherein the AAV capsid protein having the peptide insertion comprises a VP1, VP2 and/or VP3 capsid sequence having 90% or more identity to Spk200 (SEQ ID NO:1), Spk100 (SEQ ID NO:59), AAV1, AAV2 (SEQ ID NO:122), AAV3, AAV4, AAV5, AAV6, AAV7, AAV8, AAV9, AAV10, AAV11, AAV12, Rh10, or Rh74 VP1, VP2 and/or VP3 sequences.

39. A recombinant adeno-associated virus (rAAV) particle comprising: a) a modified AAV capsid protein of any of claims 1-39; and b) a vector genome comprising a heterologous nucleic acid sequence.

40. A recombinant adeno-associated virus (rAAV) particle comprising a modified AAV capsid protein of any of claims 1-39, wherein said rAAV particle is devoid of a heterologous nucleic acid sequence.

41. The rAAV particle of claim 39 or 40, wherein said peptide insertion does not prevent assembly of the rAAV particle.

42. The rAAV particle of claim 39 or 40, wherein said peptide insertion does not prevent cell infectivity of the rAAV particle.

43. The rAAV particle of claim 39 or 40, wherein said peptide insertion increases or enhances entry or transduction of said rAAV particle into the nucleus of a cell, as compared to entry or transduction into the nucleus of a cell of an rAAV particle comprising said parental AAV capsid protein.

44. The rAAV particle of claim 39 or 40, wherein said peptide insertion increases or enhances escape of said rAAV particle from cell endosomes as compared to escape of an rAAV particle comprising said parental AAV capsid protein from cell endosomes.

45. The rAAV particle of claim 39 or 40, wherein said peptide insertion reduces or decreases degradation of said rAAV particle in lysosomes of cells as compared to degradation in lysosomes of cells of an rAAV particle comprising said parental AAV capsid protein.

46. A plurality of rAAV particles of any of claims 39-45.

47. A pharmaceutical composition comprising the rAAV particle of any of claims 39-45.

48. A pharmaceutical composition comprising the rAAV particles of claim 46.

49. A method for delivering or transferring a heterologous nucleic acid sequence into a mammal or a cell of a mammal, comprising administering the rAAV particle, rAAV particles or pharmaceutical composition of any of claims 39-48 to said mammal or a cell of said mammal.

50. A method of treating a mammal deficient in protein expression or function, comprising administering an effective amount of the rAAV particle or pharmaceutical composition of any of claims 39-48 to said mammal, wherein said heterologous nucleic acid sequence encodes a protein having a function of the deficient protein, and wherein said protein having said function of said deficient protein is expressed in said mammal, thereby treating said mammal deficient in protein expression or function.

51. The rAAV particle or method of any of claim 49 or 50, wherein said heterologous nucleic acid sequence comprises or encodes a blood coagulation Factor.

52. The rAAV particle or method of any of claims 39-51, wherein said heterologous nucleic acid sequence encodes Factor VII, VIII, IX, X, XI, V, XII, II, von Willebrand factor, vitamin K epoxide reductase C1, or gamma-carboxylase.

53. The rAAV particle or method of claim 52, wherein said Factor VIII has a B domain deletion (BDD).

54. The rAAV particle or method of claim 53, wherein said heterologous nucleic acid sequence encoding said factor VIII with the B domain deletion has 20 or fewer, 15 or fewer, or 10 or fewer cytosine-guanine dinucleotides (CpGs).

55. The rAAV particle or method of claim 53, wherein said heterologous nucleic acid sequence encoding saidfactor VIII with the B domain deletion has no more than 5 cytosine-guanine dinucleotides (CpGs).

56. The rAAV particle or method of claim 53, wherein said heterologous nucleic acid sequence encoding said factor VIII with the B domain deletion has 4, 3, 2, 1 or 0 cytosine-guanine dinucleotides (CpGs).

57. The rAAV particle or method of claim 53, wherein said factor VIII comprises SEQ ID NO:123 having a deletion of one or more amino acids of the sequence SFSQNPPVLKRHQR (SEQ ID NO:124), or a deletion of the entire sequence SFSQNPPVLKRHQR.

58. The rAAV particle or method of any of claims 39-50, wherein said heterologous nucleic acid sequence comprises or encodes acid alpha-glucosidase (GAA); ATP7B (copper transporting ATPase2); alpha galactosidase; ASS1 (arginosuccinate synthase); beta-glucocerebrosidase; beta-hexosaminidase A; SERPING1 (C1 protease inhibitor); glucose-6-phosphatase; erythropoietin (EPO; interferon-alpha; interferon-beta; interferon-gamma; an interleukin (IL); any one of interleukins 1-36 (IL-1 through IL-36); interleukin (IL) receptor; a chemokine; chemokine (C—X—C motif) ligand 5 (CXCL5); granulocyte-colony stimulating factor (G-CSF); granulocyte-macrophage colony stimulating factor (GM-CSF); macrophage colony stimulating factor (M-CSF); keratinocyte growth factor (KGF); monocyte chemoattractant protein-1 (MCP-1); tumor necrosis factor (TNF); a tumor necrosis factor (TNF) receptor; alpha-1 antitrypsin; alpha-L-iduronidase; ornithine transcarbamoylase; phenylalanine hydroxylase (PAH); phenylalanine ammonia-lyase (PAL); lipoprotein lipase; an apolipoprotein; low-density lipoprotein receptor (LDL-R); albumin; lecithin cholesterol acyltransferase (LCAT); carbamoyl synthetase I; argininosuccinate synthetase; argininosuccinate lyase; arginase; fumarylacetoacetate hydrolase; porphobilinogen deaminase; cystathionine beta-synthase; branched chain ketoacid decarboxylase; isovaleryl-CoA dehydrogenase; propionyl CoA carboxylase; methylmalonyl-CoA mutase; glutaryl CoA dehydrogenase; insulin; pyruvate carboxylase; hepatic phosphorylase; phosphorylase kinase; glycine decarboxylase; H-protein, T-protein, cystic fibrosis transmembrane regulator (CFTR); ATP-binding cassette, sub-family A (ABC1), member 4 (ABCA4); or dystrophin.

59. The rAAV particle or method of any of claims 39-50, wherein said heterologous nucleic acid sequence encodes an inhibitory RNA selected from a short hairpin (sh)RNA, a microRNA (miRNA), a small or short interfering (si)RNA, a trans-splicing RNA, and an antisense RNA.

60. The method of claim 49 or 50, wherein said mammal is human.

61. The method of claim 60, wherein said human has a blood clotting disorder, Pompe disease, Wilson's disease, Fabry disease, citrullinemia type 1, Gaucher disease type 1, Tay Sachs disease, hereditary angioedema (HAE), glycogen storage disease type I (GSDI), anemia, interferon-alpha, interferon-beta, or interferon-gamma related immune disorders, a viral infections, cancer, an inflammatory disease, an immune deficiency, an immune disorder, Crohn's disease, epithelial tissue damage, insulin resistance, emphysema, chronic obstructive pulmonary disease (COPD), mucopolysaccharidosis I (MPS I), ornithine transcarbamylase (OTC) deficiency, phenylketonuria (PKU), lipoprotein lipase deficiency, apolipoprotein (Apo) A-I deficiency, familial hypercholesterolemia (FH), Stargardt disease or hypoalbuminemia.

62. The method of claim 61, wherein said blood clotting disorder is hemophilia A or hemophilia B.

63. The rAAV particle or method of any of claims 39-57, wherein said vector genome further comprises an intron, an expression control element, one or more AAV inverted terminal repeats (ITRs) and/or a filler polynucleotide sequence.

64. The rAAV particle or method of claim 63, wherein said intron is within or flanks said heterologous nucleic acid sequence.

65. The rAAV particle or method of claim 63, wherein said expression control element is operably linked said heterologous nucleic acid sequence.

66. The rAAV particle or method of claim 63, wherein said AAV ITR(s) flanks the 5′ and/or 3′ terminus of said heterologous nucleic acid sequence.

67. The rAAV particle or method of claim 63, wherein said filler polynucleotide sequence flanks the 5′ or 3′terminus of said heterologous nucleic acid sequence.

68. The rAAV particle or method of claim 63, wherein said intron, said expression control element, said one or more AAV, ITRs, and/or said filler polynucleotide sequence has been modified to have reduced cytosine-guanine dinucleotides (CpGs).

69. The rAAV particle or method of claim 63, wherein said expression control element comprises a constitutive or regulatable control element, or a tissue-specific expression control element or promoter.

70. The rAAV particle or method of claim 63, wherein said expression control element comprises an element that confers expression in liver.

71. The rAAV particle or method of claim 63, wherein said expression control element comprises a transthyretin (TTR) promoter (SEQ ID NO:125) or mutant (TTRmut) promoter (SEQ ID NO:126).

72. The rAAV particle or method of claim 63, wherein said ITR comprises one or more ITR of any of: AAV1, AAV2, AAV3, AAV4, AAV5, AAV6, AAV7, AAV8, AAV9, AAV10, AAV11, Rh10, Rh74 or AAV-3B AAV serotypes, or a combination thereof.

73. The rAAV particle or method of any of claims 39-72, wherein said rAAV particle comprises an AAV pseudotype wherein said AAV capsid serotype is different from said ITR serotype.

74. The rAAV particle or method of any of claims 39-72, wherein said rAAV particle comprises an AAV serotype, wherein said AAV capsid serotype is identical to said ITR serotype.

75. A method of treating a mammal having aberrant or undesirable protein expression or activity, comprising administering an effective amount of the rAAV particle, or rAAV particles or pharmaceutical composition of any of claims 37-46 and 49-74 to said mammal, wherein said heterologous nucleic acid sequence is expressed in said mammal, wherein said heterologous nucleic acid sequence encodes an inhibitory RNA selected from a short hairpin (sh)RNA, a microRNA (miRNA), a small or short interfering (si)RNA, a trans-splicing RNA, and an antisense RNA, thereby treating the mammal.

76. A cell comprising a nucleic acid encoding the modified AAV capsid protein of any of claims 1-38.

77. A method of producing the rAAV particle of any of claims 39-48 and 51-74, comprising a. introducing a nucleic acid encoding the modified AAV capsid protein of any of claims 1-38 into a packaging helper cell, said helper cell comprising said vector genome; and b. culturing said helper cell under conditions to produce said rAAV particle.

78. A method of producing the rAAV particle of any of claims 39-48 and 51-74, comprising a. introducing a nucleic acid encoding the modified AAV capsid protein of any of claims 1-38 and introducing said vector genome into a packaging helper cell; and b. culturing said helper cells under conditions to produce said rAAV.

79. The cell or method of any of claims 76-78, wherein said cell comprises mammalian cells.

80. The cell or method of any of claims 76-78, wherein said cell provides helper functions that package said vector into a viral particle.

81. The cell or method of any of claims 76-78, wherein said cell provides AAV helper functions.

82. The cell or method of any of claims 76-78, wherein said cell provides AAV Rep and/or Cap proteins.

83. The cell or method of any of claims 76-78, wherein said cell is stably or transiently transfected with polynucleotide(s) encoding Rep and/or Cap protein sequence(s).

84. The cell or method of any of claims 76-78, wherein said cell provides Rep78 or/and Rep68 proteins.

85. The cell or method of any of claims 76-78, wherein said cell is stably or transiently transfected with Rep78 and Rep68 proteins polynucleotide encoding sequence(s).

86. The cell or method of any of claims 76-78, wherein said cell comprises mammalian cells.

87. The cell or method of any of claims 76-78, wherein said cell comprises HEK-293 cells.
